United States Patent Application Publication US 2025/0179441 A1 - sequence listing, part 3

SEQ ID NO: 43588 - DNA, 21 bp, synthetic construct
  misc_feature 1..21: note = Description of Artificial Sequence: Synthetic oligonucleotide
  source 1..21: mol_type = other DNA
aatcttgcttctagttcttat

SEQ ID NO: 43589 - DNA, 21 bp, synthetic construct
  misc_feature 1..21: note = Description of Artificial Sequence: Synthetic oligonucleotide
  source 1..21: mol_type = other DNA
ggcagcgccggcaacatgctc

SEQ ID NO: 43590 - DNA, 21 bp, synthetic construct
  misc_feature 1..21: note = Description of Artificial Sequence: Synthetic oligonucleotide
  source 1..21: mol_type = other DNA
cttcttacgtcgcctaattcg

SEQ ID NO: 43591 - DNA, 21 bp, synthetic construct
  misc_feature 1..21: note = Description of Artificial Sequence: Synthetic oligonucleotide
  source 1..21: mol_type = other DNA
agacccgccagcacccacacc

SEQ ID NO: 43592 - DNA, 21 bp, synthetic construct
  misc_feature 1..21: note = Description of Artificial Sequence: Synthetic oligonucleotide
  source 1..21: mol_type = other DNA
agttcgtctgataagcttcgt

SEQ ID NO: 43593 - DNA, 21 bp, synthetic construct
  misc_feature 1..21: note = Description of Artificial Sequence: Synthetic oligonucleotide
  source 1..21: mol_type = other DNA
gacggcctcagaaacagcctc

SEQ ID NO: 43594 - DNA, 21 bp, synthetic construct
  misc_feature 1..21: note = Description of Artificial Sequence: Synthetic oligonucleotide
  source 1..21: mol_type = other DNA
gacgtcctcagcaaaagccaa

SEQ ID NO: 43595 - DNA, 21 bp, synthetic construct
  misc_feature 1..21: note = Description of Artificial Sequence: Synthetic oligonucleotide
  source 1..21: mol_type = other DNA
gtccccagccaaaacagagcc

SEQ ID NO: 43596 - DNA, 21 bp, synthetic construct
  misc_feature 1..21: note = Description of Artificial Sequence: Synthetic oligonucleotide
  source 1..21: mol_type = other DNA
gtgggtagtcagactaatagt

SEQ ID NO: 43597 - DNA, 21 bp, synthetic construct
  misc_feature 1..21: note = Description of Artificial Sequence: Synthetic oligonucleotide
  source 1..21: mol_type = other DNA
agcccccacaaacaagccaac

SEQ ID NO: 43598 - DNA, 21 bp, synthetic construct
  misc_feature 1..21: note = Description of Artificial Sequence: Synthetic oligonucleotide
  source 1..21: mol_type = other DNA
gtcagcgtcgacaaaagaccc

SEQ ID NO: 43599 - DNA, 21 bp, synthetic construct
  misc_feature 1..21: note = Description of Artificial Sequence: Synthetic oligonucleotide
  source 1..21: mol_type = other DNA
agcagagtcaccgtcagccaa

SEQ ID NO: 43600 - DNA, 21 bp, synthetic construct
  misc_feature 1..21: note = Description of Artificial Sequence: Synthetic oligonucleotide
  source 1..21: mol_type = other DNA
gctaggggtgcttctactaat

SEQ ID NO: 43601 - DNA, 21 bp, synthetic construct
  misc_feature 1..21: note = Description of Artificial Sequence: Synthetic oligonucleotide
  source 1..21: mol_type = other DNA
catgtgactaagtctacggct

SEQ ID NO: 43602 - DNA, 21 bp, synthetic construct
  misc_feature 1..21: note = Description of Artificial Sequence: Synthetic oligonucleotide
  source 1..21: mol_type = other DNA
gtccaacaaagcaaagcctac

SEQ ID NO: 43603 - DNA, 21 bp, synthetic construct
  misc_feature 1..21: note = Description of Artificial Sequence: Synthetic oligonucleotide
  source 1..21: mol_type = other DNA
gctaatgctacgccgcatcat

SEQ ID NO: 43604 - DNA, 21 bp, synthetic construct
  misc_feature 1..21: note = Description of Artificial Sequence: Synthetic oligonucleotide
  source 1..21: mol_type = other DNA
aacggcagcggccaaaaacaa

SEQ ID NO: 43605 - DNA, 21 bp, synthetic construct
  misc_feature 1..21: note = Description of Artificial Sequence: Synthetic oligonucleotide
  source 1..21: mol_type = other DNA
tataatagtactactgcgact

SEQ ID NO: 43606 - DNA, 21 bp, synthetic construct
  misc_feature 1..21: note = Description of Artificial Sequence: Synthetic oligonucleotide
  source 1..21: mol_type = other DNA
aatcggcatgagcgggtgatt

SEQ ID NO: 43607 - DNA, 21 bp, synthetic construct
  misc_feature 1..21: note = Description of Artificial Sequence: Synthetic oligonucleotide
  source 1..21: mol_type = other DNA
agacccgccggccaacacagc

SEQ ID NO: 43608 - DNA, 21 bp, synthetic construct
  misc_feature 1..21: note = Description of Artificial Sequence: Synthetic oligonucleotide
  source 1..21: mol_type = other DNA
tctgctcagaagaatcttatt

SEQ ID NO: 43609 - DNA, 21 bp, synthetic construct
  misc_feature 1..21: note = Description of Artificial Sequence: Synthetic oligonucleotide
  source 1..21: mol_type = other DNA
gttatggatgtgcagcatagg

SEQ ID NO: 43610 - DNA, 21 bp, synthetic construct
  misc_feature 1..21: note = Description of Artificial Sequence: Synthetic oligonucleotide
  source 1..21: mol_type = other DNA
aatcgttctaataattctgtg

SEQ ID NO: 43611 - DNA, 21 bp, synthetic construct
  misc_feature 1..21: note = Description of Artificial Sequence: Synthetic oligonucleotide
  source 1..21: mol_type = other DNA
agagaagtcgacggcatcaga

SEQ ID NO: 43612 - DNA, 21 bp, synthetic construct
  misc_feature 1..21: note = Description of Artificial Sequence: Synthetic oligonucleotide
  source 1..21: mol_type = other DNA
ggtactacttctagtcgggat

SEQ ID NO: 43613 - DNA, 21 bp, synthetic construct
  misc_feature 1..21: note = Description of Artificial Sequence: Synthetic oligonucleotide
  source 1..21: mol_type = other DNA
cgttattcgagggataatgtt

SEQ ID NO: 43614 - DNA, 21 bp, synthetic construct
  misc_feature 1..21: note = Description of Artificial Sequence: Synthetic oligonucleotide
  source 1..21: mol_type = other DNA
ccgaagttggcggcggatctt

SEQ ID NO: 43615 - DNA, 21 bp, synthetic construct
  misc_feature 1..21: note = Description of Artificial Sequence: Synthetic oligonucleotide
  source 1..21: mol_type = other DNA
accaccgccagcagccccacc

SEQ ID NO: 43616 - DNA, 21 bp, synthetic construct
  misc_feature 1..21: note = Description of Artificial Sequence: Synthetic oligonucleotide
  source 1..21: mol_type = other DNA
ggtgggactaataatcttaat

SEQ ID NO: 43617 - DNA, 21 bp, synthetic construct
  misc_feature 1..21: note = Description of Artificial Sequence: Synthetic oligonucleotide
  source 1..21: mol_type = other DNA
actaatgttgataagccgttt

SEQ ID NO: 43618 - DNA, 21 bp, synthetic construct
  misc_feature 1..21: note = Description of Artificial Sequence: Synthetic oligonucleotide
  source 1..21: mol_type = other DNA
ccccccctcgaccaagtctac

SEQ ID NO: 43619 - DNA, 21 bp, synthetic construct
  misc_feature 1..21: note = Description of Artificial Sequence: Synthetic oligonucleotide
  source 1..21: mol_type = other DNA
gttgttaatgctctgaggggg

SEQ ID NO: 43620 - DNA, 21 bp, synthetic construct
  misc_feature 1..21: note = Description of Artificial Sequence: Synthetic oligonucleotide
  source 1..21: mol_type = other DNA
tattttactgatgatacgagg

SEQ ID NO: 43621 - DNA, 21 bp, synthetic construct
  misc_feature 1..21: note = Description of Artificial Sequence: Synthetic oligonucleotide
  source 1..21: mol_type = other DNA
agacaaaccgacaaactcagc

SEQ ID NO: 43622 - DNA, 21 bp, synthetic construct
  misc_feature 1..21: note = Description of Artificial Sequence: Synthetic oligonucleotide
  source 1..21: mol_type = other DNA
tggaacaaaaccagcccccaa

SEQ ID NO: 43623 - DNA, 21 bp, synthetic construct
  misc_feature 1..21: note = Description of Artificial Sequence: Synthetic oligonucleotide
  source 1..21: mol_type = other DNA
agcgccgacaccagacccgtc

SEQ ID NO: 43624 - DNA, 21 bp, synthetic construct
  misc_feature 1..21: note = Description of Artificial Sequence: Synthetic oligonucleotide
  source 1..21: mol_type = other DNA
ccgagttctggtcatagtcgt

SEQ ID NO: 43625 - DNA, 21 bp, synthetic construct
  misc_feature 1..21: note = Description of Artificial Sequence: Synthetic oligonucleotide
  source 1..21: mol_type = other DNA
aatcgggagtcgccgcagagg

SEQ ID NO: 43626 - DNA, 21 bp, synthetic construct
  misc_feature 1..21: note = Description of Artificial Sequence: Synthetic oligonucleotide
  source 1..21: mol_type = other DNA
tctactgggtcggtgagtaag

SEQ ID NO: 43627 - DNA, 21 bp, synthetic construct
  misc_feature 1..21: note = Description of Artificial Sequence: Synthetic oligonucleotide
  source 1..21: mol_type = other DNA
agccccgccagcctccccaaa

SEQ ID NO: 43628 - DNA, 21 bp, synthetic construct
  misc_feature 1..21: note = Description of Artificial Sequence: Synthetic oligonucleotide
  source 1..21: mol_type = other DNA
aaactcggccaagacgtcaga

SEQ ID NO: 43629 - DNA, 21 bp, synthetic construct
  misc_feature 1..21: note = Description of Artificial Sequence: Synthetic oligonucleotide
  source 1..21: mol_type = other DNA
tttggtgagtcgactatgagg

SEQ ID NO: 43630 - DNA, 21 bp, synthetic construct
  misc_feature 1..21: note = Description of Artificial Sequence: Synthetic oligonucleotide
  source 1..21: mol_type = other DNA
agagacaccagagaaagccaa

SEQ ID NO: 43631 - DNA, 21 bp, synthetic construct
  misc_feature 1..21: note = Description of Artificial Sequence: Synthetic oligonucleotide
  source 1..21: mol_type = other DNA
aataatcctaatcgtgatcag

SEQ ID NO: 43632 - DNA, 21 bp, synthetic construct
  misc_feature 1..21: note = Description of Artificial Sequence: Synthetic oligonucleotide
  source 1..21: mol_type = other DNA
caaagcagcagccaacaaaga

SEQ ID NO: 43633 - DNA, 21 bp, synthetic construct
  misc_feature 1..21: note = Description of Artificial Sequence: Synthetic oligonucleotide
  source 1..21: mol_type = other DNA
ggtagtcttgataataggaag

SEQ ID NO: 43634 - DNA, 21 bp, synthetic construct
  misc_feature 1..21: note = Description of Artificial Sequence: Synthetic oligonucleotide
  source 1..21: mol_type = other DNA
cccggcagcggcagcaaccac

SEQ ID NO: 43635 - DNA, 21 bp, synthetic construct
  misc_feature 1..21: note = Description of Artificial Sequence: Synthetic oligonucleotide
  source 1..21: mol_type = other DNA
gacctcgacaccaaagccctc

SEQ ID NO: 43636 - DNA, 21 bp, synthetic construct
  misc_feature 1..21: note = Description of Artificial Sequence: Synthetic oligonucleotide
  source 1..21: mol_type = other DNA
caacccaccagaagcaccgcc

SEQ ID NO: 43637 - DNA, 21 bp, synthetic construct
  misc_feature 1..21: note = Description of Artificial Sequence: Synthetic oligonucleotide
  source 1..21: mol_type = other DNA
cccagcaacaccggcaccatc

SEQ ID NO: 43638 - DNA, 21 bp, synthetic construct
  misc_feature 1..21: note = Description of Artificial Sequence: Synthetic oligonucleotide
  source 1..21: mol_type = other DNA
gctacttctacgaatggtatt

SEQ ID NO: 43639 - DNA, 21 bp, synthetic construct
  misc_feature 1..21: note = Description of Artificial Sequence: Synthetic oligonucleotide
  source 1..21: mol_type = other DNA
gagggttctgggaggcttact

SEQ ID NO: 43640 - DNA, 21 bp, synthetic construct
  misc_feature 1..21: note = Description of Artificial Sequence: Synthetic oligonucleotide
  source 1..21: mol_type = other DNA
acgcagatgggtaagtcgaat

SEQ ID NO: 43641 - DNA, 21 bp, synthetic construct
  misc_feature 1..21: note = Description of Artificial Sequence: Synthetic oligonucleotide
  source 1..21: mol_type = other DNA
tataataagaatgctcagttg

SEQ ID NO: 43642 - DNA, 21 bp, synthetic construct
  misc_feature 1..21: note = Description of Artificial Sequence: Synthetic oligonucleotide
  source 1..21: mol_type = other DNA
actggtaataaggggggggtg

SEQ ID NO: 43643 - DNA, 21 bp, synthetic construct
  misc_feature 1..21: note = Description of Artificial Sequence: Synthetic oligonucleotide
  source 1..21: mol_type = other DNA
ccgcctcatgatgggcagcgt

SEQ ID NO: 43644 - DNA, 21 bp, synthetic construct
  misc_feature 1..21: note = Description of Artificial Sequence: Synthetic oligonucleotide
  source 1..21: mol_type = other DNA
aacaacgtcggcgtcagaggc

SEQ ID NO: 43645 - DNA, 21 bp, synthetic construct
  misc_feature 1..21: note = Description of Artificial Sequence: Synthetic oligonucleotide
  source 1..21: mol_type = other DNA
agggagaagcagcataatggg

SEQ ID NO: 43646 - DNA, 21 bp, synthetic construct
  misc_feature 1..21: note = Description of Artificial Sequence: Synthetic oligonucleotide
  source 1..21: mol_type = other DNA
caagtccccgccagccacggc

SEQ ID NO: 43647 - DNA, 21 bp, synthetic construct
  misc_feature 1..21: note = Description of Artificial Sequence: Synthetic oligonucleotide
  source 1..21: mol_type = other DNA
catccggagactgcttttaag

SEQ ID NO: 43648 - DNA, 21 bp, synthetic construct
  misc_feature 1..21: note = Description of Artificial Sequence: Synthetic oligonucleotide
  source 1..21: mol_type = other DNA
ttgaatcagcattcgagtatt

SEQ ID NO: 43649 - DNA, 21 bp, synthetic construct
  misc_feature 1..21: note = Description of Artificial Sequence: Synthetic oligonucleotide
  source 1..21: mol_type = other DNA
agaaccgtcgacagcagcgac

SEQ ID NO: 43650 - DNA, 21 bp, synthetic construct
  misc_feature 1..21: note = Description of Artificial Sequence: Synthetic oligonucleotide
  source 1..21: mol_type = other DNA
agaaccagaaacacccccacc

SEQ ID NO: 43651 - DNA, 21 bp, synthetic construct
  misc_feature 1..21: note = Description of Artificial Sequence: Synthetic oligonucleotide
  source 1..21: mol_type = other DNA
ttcagaacccaaagcgtcggc

SEQ ID NO: 43652 - DNA, 21 bp, synthetic construct
  misc_feature 1..21: note = Description of Artificial Sequence: Synthetic oligonucleotide
  source 1..21: mol_type = other DNA
ccgactggggcgcatgttacg

SEQ ID NO: 43653 - DNA, 21 bp, synthetic construct
  misc_feature 1..21: note = Description of Artificial Sequence: Synthetic oligonucleotide
  source 1..21: mol_type = other DNA
ccccacagcaccggcagcatc

SEQ ID NO: 43654 - DNA, 21 bp, synthetic construct
  misc_feature 1..21: note = Description of Artificial Sequence: Synthetic oligonucleotide
  source 1..21: mol_type = other DNA
gcgcaggcgaggctgatgaat

SEQ ID NO: 43655 - DNA, 21 bp, synthetic construct
  misc_feature 1..21: note = Description of Artificial Sequence: Synthetic oligonucleotide
  source 1..21: mol_type = other DNA
catagttctaagtcgcatgat

SEQ ID NO: 43656 - DNA, 21 bp, synthetic construct
  misc_feature 1..21: note = Description of Artificial Sequence: Synthetic oligonucleotide
  source 1..21: mol_type = other DNA
ggctgcatcaccaactgcagc

SEQ ID NO: 43657 - DNA, 21 bp, synthetic construct
  misc_feature 1..21: note = Description of Artificial Sequence: Synthetic oligonucleotide
  source 1..21: mol_type = other DNA
gaaagaatgggcaaaaaccaa

SEQ ID NO: 43658 - DNA, 21 bp, synthetic construct
  misc_feature 1..21: note = Description of Artificial Sequence: Synthetic oligonucleotide
  source 1..21: mol_type = other DNA
atgacccaacacaaacaagcc

SEQ ID NO: 43659 - DNA, 21 bp, synthetic construct
  misc_feature 1..21: note = Description of Artificial Sequence: Synthetic oligonucleotide
  source 1..21: mol_type = other DNA
aagagtgatgctcatacggct

SEQ ID NO: 43660 - DNA, 21 bp, synthetic construct
  misc_feature 1..21: note = Description of Artificial Sequence: Synthetic oligonucleotide
  source 1..21: mol_type = other DNA
actgttactaatgcggctcgt

SEQ ID NO: 43661 - DNA, 21 bp, synthetic construct
  misc_feature 1..21: note = Description of Artificial Sequence: Synthetic oligonucleotide
  source 1..21: mol_type = other DNA
gtttctggtacgcctcgggtt

SEQ ID NO: 43662 - DNA, 21 bp, synthetic construct
  misc_feature 1..21: note = Description of Artificial Sequence: Synthetic oligonucleotide
  source 1..21: mol_type = other DNA
taccccaacggcaaaagcagc

SEQ ID NO: 43663 - DNA, 21 bp, synthetic construct
  misc_feature 1..21: note = Description of Artificial Sequence: Synthetic oligonucleotide
  source 1..21: mol_type = other DNA
gccgtcagcaaaggcggcccc

SEQ ID NO: 43664 - DNA, 21 bp, synthetic construct
  misc_feature 1..21: note = Description of Artificial Sequence: Synthetic oligonucleotide
  source 1..21: mol_type = other DNA
cccgaaatcagcgccagcaga

SEQ ID NO: 43665 - DNA, 21 bp, synthetic construct
  misc_feature 1..21: note = Description of Artificial Sequence: Synthetic oligonucleotide
  source 1..21: mol_type = other DNA
cagaatcgtaatactgttggt

SEQ ID NO: 43666 - DNA, 21 bp, synthetic construct
  misc_feature 1..21: note = Description of Artificial Sequence: Synthetic oligonucleotide
  source 1..21: mol_type = other DNA
tctgtttctgggaggcatatt

SEQ ID NO: 43667 - DNA, 21 bp, synthetic construct
  misc_feature 1..21: note = Description of Artificial Sequence: Synthetic oligonucleotide
  source 1..21: mol_type = other DNA
atgcctgcgaggaatgtttct

SEQ ID NO: 43668 - DNA, 21 bp, synthetic construct
  misc_feature 1..21: note = Description of Artificial Sequence: Synthetic oligonucleotide
  source 1..21: mol_type = other DNA
aaccccagaatgagcatgagc

SEQ ID NO: 43669 - DNA, 21 bp, synthetic construct
  misc_feature 1..21: note = Description of Artificial Sequence: Synthetic oligonucleotide
  source 1..21: mol_type = other DNA
agcagagcccaaagcatcccc

SEQ ID NO: 43670 - DNA, 21 bp, synthetic construct
  misc_feature 1..21: note = Description of Artificial Sequence: Synthetic oligonucleotide
  source 1..21: mol_type = other DNA
ccgttgattaatcgtactatg

SEQ ID NO: 43671 - DNA, 21 bp, synthetic construct
  misc_feature 1..21: note = Description of Artificial Sequence: Synthetic oligonucleotide
  source 1..21: mol_type = other DNA
tctgctgagttgagggttgcg

SEQ ID NO: 43672 - DNA, 21 bp, synthetic construct
  misc_feature 1..21: note = Description of Artificial Sequence: Synthetic oligonucleotide
  source 1..21: mol_type = other DNA
gccatcagccccacctacatg

SEQ ID NO: 43673 - DNA, 21 bp, synthetic construct
  misc_feature 1..21: note = Description of Artificial Sequence: Synthetic oligonucleotide
  source 1..21: mol_type = other DNA
agggatgataagcagaattcg

SEQ ID NO: 43674 - DNA, 21 bp, synthetic construct
  misc_feature 1..21: note = Description of Artificial Sequence: Synthetic oligonucleotide
  source 1..21: mol_type = other DNA
ccttctcaggaggggcagcag

SEQ ID NO: 43675 - DNA, 21 bp, synthetic construct
  misc_feature 1..21: note = Description of Artificial Sequence: Synthetic oligonucleotide
  source 1..21: mol_type = other DNA
ccgacgcggacggcgagtaat

SEQ ID NO: 43676 - DNA, 21 bp, synthetic construct
  misc_feature 1..21: note = Description of Artificial Sequence: Synthetic oligonucleotide
  source 1..21: mol_type = other DNA
ggcagactcaccagcagcatc

SEQ ID NO: 43677 - DNA, 21 bp, synthetic construct
  misc_feature 1..21: note = Description of Artificial Sequence: Synthetic oligonucleotide
  source 1..21: mol_type = other DNA
atgcttgggtctagtaataag

SEQ ID NO: 43678 - DNA, 21 bp, synthetic construct
  misc_feature 1..21: note = Description of Artificial Sequence: Synthetic oligonucleotide
  source 1..21: mol_type = other DNA
gaggttactaattcgcctagg

SEQ ID NO: 43679 - DNA, 21 bp, synthetic construct
  misc_feature 1..21: note = Description of Artificial Sequence: Synthetic oligonucleotide
  source 1..21: mol_type = other DNA
ggtggggttggtgggaagtct

SEQ ID NO: 43680 - DNA, 21 bp, synthetic construct
  misc_feature 1..21: note = Description of Artificial Sequence: Synthetic oligonucleotide
  source 1..21: mol_type = other DNA
aacgccaccagccccagaaaa

SEQ ID NO: 43681 - DNA, 21 bp, synthetic construct
  misc_feature 1..21: note = Description of Artificial Sequence: Synthetic oligonucleotide
  source 1..21: mol_type = other DNA
tctcttagtaagcaggcggcg

SEQ ID NO: 43682 - DNA, 21 bp, synthetic construct
  misc_feature 1..21: note = Description of Artificial Sequence: Synthetic oligonucleotide
  source 1..21: mol_type = other DNA
ggccaagccatgcccttcaaa

SEQ ID NO: 43683 - DNA, 21 bp, synthetic construct
  misc_feature 1..21: note = Description of Artificial Sequence: Synthetic oligonucleotide
  source 1..21: mol_type = other DNA
tacagaagcaaagaaatcggc

SEQ ID NO: 43684 - DNA, 21 bp, synthetic construct
  misc_feature 1..21: note = Description of Artificial Sequence: Synthetic oligonucleotide
  source 1..21: mol_type = other DNA
aacagccaccaaaaacccagc

SEQ ID NO: 43685 - DNA, 21 bp, synthetic construct
  misc_feature 1..21: note = Description of Artificial Sequence: Synthetic oligonucleotide
  source 1..21: mol_type = other DNA
gcgacggcgaatactcatatg

SEQ ID NO: 43686 - DNA, 21 bp, synthetic construct
  misc_feature 1..21: note = Description of Artificial Sequence: Synthetic oligonucleotide
  source 1..21: mol_type = other DNA
cccagacacgcccccctcctc

SEQ ID NO: 43687 - DNA, 21 bp, synthetic construct
  misc_feature 1..21: note = Description of Artificial Sequence: Synthetic oligonucleotide
  source 1..21: mol_type = other DNA
ggtagggatactcggagtagt

SEQ ID NO: 43688 - DNA, 21 bp, synthetic construct
  misc_feature 1..21: note = Description of Artificial Sequence: Synthetic oligonucleotide
  source 1..21: mol_type = other DNA
gacagcgtcgccggcttcacc

SEQ ID NO: 43689 - DNA, 21 bp, synthetic construct
  misc_feature 1..21: note = Description of Artificial Sequence: Synthetic oligonucleotide
  source 1..21: mol_type = other DNA
cagagggttcatccgagtggg

SEQ ID NO: 43690 - DNA, 21 bp, synthetic construct
  misc_feature 1..21: note = Description of Artificial Sequence: Synthetic oligonucleotide
  source 1..21: mol_type = other DNA
taccaacacagagcccccagc

SEQ ID NO: 43691 - DNA, 21 bp, synthetic construct
  misc_feature 1..21: note = Description of Artificial Sequence: Synthetic oligonucleotide
  source 1..21: mol_type = other DNA
aacggccaagccggcaacaga

SEQ ID NO: 43692 - DNA, 21 bp, synthetic construct
  misc_feature 1..21: note = Description of Artificial Sequence: Synthetic oligonucleotide
  source 1..21: mol_type = other DNA
gggcgtgagactgtttctcgg

SEQ ID NO: 43693 - DNA, 21 bp, synthetic construct
  misc_feature 1..21: note = Description of Artificial Sequence: Synthetic oligonucleotide
  source 1..21: mol_type = other DNA
cctcaggattctagggggatg

SEQ ID NO: 43694 - DNA, 21 bp, synthetic construct
  misc_feature 1..21: note = Description of Artificial Sequence: Synthetic oligonucleotide
  source 1..21: mol_type = other DNA
tttcctctgactaagcctgct

SEQ ID NO: 43695 - DNA, 21 bp, synthetic construct
  misc_feature 1..21: note = Description of Artificial Sequence: Synthetic oligonucleotide
  source 1..21: mol_type = other DNA
ggtattgcgggggtgactcgt

SEQ ID NO: 43696 - DNA, 21 bp, synthetic construct
  misc_feature 1..21: note = Description of Artificial Sequence: Synthetic oligonucleotide
  source 1..21: mol_type = other DNA
tataataggagtgagcgtcct

SEQ ID NO: 43697 - DNA, 21 bp, synthetic construct
  misc_feature 1..21: note = Description of Artificial Sequence: Synthetic oligonucleotide
  source 1..21: mol_type = other DNA
gtcaccggcagagcctacctc

SEQ ID NO: 43698 - DNA, 21 bp, synthetic construct
  misc_feature 1..21: note = Description of Artificial Sequence: Synthetic oligonucleotide
  source 1..21: mol_type = other DNA
cagaatcgtgtttctaatggg

SEQ ID NO: 43699 - DNA, 21 bp, synthetic construct
  misc_feature 1..21: note = Description of Artificial Sequence: Synthetic oligonucleotide
  source 1..21: mol_type = other DNA
accagaagccaaggcatcctc

SEQ ID NO: 43700 - DNA, 21 bp, synthetic construct
  misc_feature 1..21: note = Description of Artificial Sequence: Synthetic oligonucleotide
  source 1..21: mol_type = other DNA
tatggtcgtgggcgtgatctt

SEQ ID NO: 43701 - DNA, 21 bp, synthetic construct
  misc_feature 1..21: note = Description of Artificial Sequence: Synthetic oligonucleotide
  source 1..21: mol_type = other DNA
gggagttctccttctttaagg

SEQ ID NO: 43702 - DNA, 21 bp, synthetic construct
  misc_feature 1..21: note = Description of Artificial Sequence: Synthetic oligonucleotide
  source 1..21: mol_type = other DNA
gttaatacgaatcgggctgct

SEQ ID NO: 43703 - DNA, 21 bp, synthetic construct
  misc_feature 1..21: note = Description of Artificial Sequence: Synthetic oligonucleotide
  source 1..21: mol_type = other DNA
cggcctattgctagttcgggt

SEQ ID NO: 43704 - DNA, 21 bp, synthetic construct
  misc_feature 1..21: note = Description of Artificial Sequence: Synthetic oligonucleotide
  source 1..21: mol_type = other DNA
gctgggtcgtcttcgcctgct

SEQ ID NO: 43705 - DNA, 21 bp, synthetic construct
  misc_feature 1..21: note = Description of Artificial Sequence: Synthetic oligonucleotide
  source 1..21: mol_type = other DNA
cccaccaccggcccccaaaga

SEQ ID NO: 43706 - DNA, 21 bp, synthetic construct
  misc_feature 1..21: note = Description of Artificial Sequence: Synthetic oligonucleotide
  source 1..21: mol_type = other DNA
atttcgcagtctactactagg

SEQ ID NO: 43707 - DNA, 21 bp, synthetic construct
  misc_feature 1..21: note = Description of Artificial Sequence: Synthetic oligonucleotide
  source 1..21: mol_type = other DNA
accaacctccccagaagccac

SEQ ID NO: 43708 - DNA, 21 bp, synthetic construct
  misc_feature 1..21: note = Description of Artificial Sequence: Synthetic oligonucleotide
  source 1..21: mol_type = other DNA
gggaatactaattcgtttctt

SEQ ID NO: 43709 - DNA, 21 bp, synthetic construct
  misc_feature 1..21: note = Description of Artificial Sequence: Synthetic oligonucleotide
  source 1..21: mol_type = other DNA
accctcagccaaaccgtcaga

SEQ ID NO: 43710 - DNA, 21 bp, synthetic construct
  misc_feature 1..21: note = Description of Artificial Sequence: Synthetic oligonucleotide
  source 1..21: mol_type = other DNA
agcagcaaagccgccatcacc

SEQ ID NO: 43711 - DNA, 21 bp, synthetic construct
  misc_feature 1..21: note = Description of Artificial Sequence: Synthetic oligonucleotide
  source 1..21: mol_type = other DNA
tctagtgggccgtcttctggg

SEQ ID NO: 43712 - DNA, 21 bp, synthetic construct
  misc_feature 1..21: note = Description of Artificial Sequence: Synthetic oligonucleotide
  source 1..21: mol_type = other DNA
gcggagaagacgaggtctttg

SEQ ID NO: 43713 - DNA, 21 bp, synthetic construct
  misc_feature 1..21: note = Description of Artificial Sequence: Synthetic oligonucleotide
  source 1..21: mol_type = other DNA
tctactcctattcgttcggtt

SEQ ID NO: 43714 - DNA, 21 bp, synthetic construct
  misc_feature 1..21: note = Description of Artificial Sequence: Synthetic oligonucleotide
  source 1..21: mol_type = other DNA
agcttcagcggcgccaacaaa

SEQ ID NO: 43715 - DNA, 21 bp, synthetic construct
  misc_feature 1..21: note = Description of Artificial Sequence: Synthetic oligonucleotide
  source 1..21: mol_type = other DNA
gttaatacgactcgtgctgag

SEQ ID NO: 43716 - DNA, 21 bp, synthetic construct
  misc_feature 1..21: note = Description of Artificial Sequence: Synthetic oligonucleotide
  source 1..21: mol_type = other DNA
ttgattaatcctgctggttct

SEQ ID NO: 43717 - DNA, 21 bp, synthetic construct
  misc_feature 1..21: note = Description of Artificial Sequence: Synthetic oligonucleotide
  source 1..21: mol_type = other DNA
atgtcgtctactcgtagtatt

SEQ ID NO: 43718 - DNA, 21 bp, synthetic construct
  misc_feature 1..21: note = Description of Artificial Sequence: Synthetic oligonucleotide
  source 1..21: mol_type = other DNA
agcccccacggcgccggctac

SEQ ID NO: 43719 - DNA, 21 bp, synthetic construct
  misc_feature 1..21: note = Description of Artificial Sequence: Synthetic oligonucleotide
  source 1..21: mol_type = other DNA
catggtactagtcctcttcgt

SEQ ID NO: 43720 - DNA, 21 bp, synthetic construct
  misc_feature 1..21: note = Description of Artificial Sequence: Synthetic oligonucleotide
  source 1..21: mol_type = other DNA
tcgaattataagtcttcgaat

SEQ ID NO: 43721 - DNA, 21 bp, synthetic construct
  misc_feature 1..21: note = Description of Artificial Sequence: Synthetic oligonucleotide
  source 1..21: mol_type = other DNA
ggcaacggcaccagacaaaac

SEQ ID NO: 43722 - DNA, 21 bp, synthetic construct
  misc_feature 1..21: note = Description of Artificial Sequence: Synthetic oligonucleotide
  source 1..21: mol_type = other DNA
ggcaccgacaacaacaccaga

SEQ ID NO: 43723 - DNA, 21 bp, synthetic construct
  misc_feature 1..21: note = Description of Artificial Sequence: Synthetic oligonucleotide
  source 1..21: mol_type = other DNA
actaggacggcgggggttgat

SEQ ID NO: 43724 - DNA, 21 bp, synthetic construct
  misc_feature 1..21: note = Description of Artificial Sequence: Synthetic oligonucleotide
  source 1..21: mol_type = other DNA
accggcgcccaaagcaccatg

SEQ ID NO: 43725 - DNA, 21 bp, synthetic construct
  misc_feature 1..21: note = Description of Artificial Sequence: Synthetic oligonucleotide
  source 1..21: mol_type = other DNA
cgtagtgcgagtgggcagttg

SEQ ID NO: 43726 - DNA, 21 bp, synthetic construct
  misc_feature 1..21: note = Description of Artificial Sequence: Synthetic oligonucleotide
  source 1..21: mol_type = other DNA
cccagaaaaatcagcaacgcc

SEQ ID NO: 43727 - DNA, 21 bp, synthetic construct
  misc_feature 1..21: note = Description of Artificial Sequence: Synthetic oligonucleotide
  source 1..21: mol_type = other DNA
gccaccaccagcagaatcagc

SEQ ID NO: 43728 - DNA, 21 bp, synthetic construct
  misc_feature 1..21: note = Description of Artificial Sequence: Synthetic oligonucleotide
  source 1..21: mol_type = other DNA
actactcctacttatactggg

SEQ ID NO: 43729 - DNA, 21 bp, synthetic construct
  misc_feature 1..21: note = Description of Artificial Sequence: Synthetic oligonucleotide
  source 1..21: mol_type = other DNA
ggggggcagaattctagtaag

SEQ ID NO: 43730 - DNA, 21 bp, synthetic construct
  misc_feature 1..21: note = Description of Artificial Sequence: Synthetic oligonucleotide
  source 1..21: mol_type = other DNA
tcgaatactaatagtgcgaat

SEQ ID NO: 43731 - DNA, 21 bp, synthetic construct
  misc_feature 1..21: note = Description of Artificial Sequence: Synthetic oligonucleotide
  source 1..21: mol_type = other DNA
cccacccaaaacggcagaagc

SEQ ID NO: 43732 - DNA, 21 bp, synthetic construct
  misc_feature 1..21: note = Description of Artificial Sequence: Synthetic oligonucleotide
  source 1..21: mol_type = other DNA
tctcagcatcgtccttcttcg

SEQ ID NO: 43733 - DNA, 21 bp, synthetic construct
  misc_feature 1..21: note = Description of Artificial Sequence: Synthetic oligonucleotide
  source 1..21: mol_type = other DNA
agcgaaagcggccaacaaaga

SEQ ID NO: 43734 - DNA, 21 bp, synthetic construct
  misc_feature 1..21: note = Description of Artificial Sequence: Synthetic oligonucleotide
  source 1..21: mol_type = other DNA
ggtactggtcatcagaggtct

SEQ ID NO: 43735 - DNA, 21 bp, synthetic construct
  misc_feature 1..21: note = Description of Artificial Sequence: Synthetic oligonucleotide
  source 1..21: mol_type = other DNA
ccttctacgtcttctgcgggg

SEQ ID NO: 43736 - DNA, 21 bp, synthetic construct
  misc_feature 1..21: note = Description of Artificial Sequence: Synthetic oligonucleotide
  source 1..21: mol_type = other DNA
tatacggcttcagctcttcgg

SEQ ID NO: 43737 - DNA, 21 bp, synthetic construct
  misc_feature 1..21: note = Description of Artificial Sequence: Synthetic oligonucleotide
  source 1..21: mol_type = other DNA
accggcgacagcggcaaagtc

SEQ ID NO: 43738 - DNA, 21 bp, synthetic construct
  misc_feature 1..21: note = Description of Artificial Sequence: Synthetic oligonucleotide
  source 1..21: mol_type = other DNA
tcgaaggttactgcgcagtct

SEQ ID NO: 43739 - DNA, 21 bp, synthetic construct
  misc_feature 1..21: note = Description of Artificial Sequence: Synthetic oligonucleotide
  source 1..21: mol_type = other DNA
atgagcctcagcaaaaaccac

SEQ ID NO: 43740 - DNA, 21 bp, synthetic construct
  misc_feature 1..21: note = Description of Artificial Sequence: Synthetic oligonucleotide
  source 1..21: mol_type = other DNA
aatcggtcgacggattttaag

SEQ ID NO: 43741 - DNA, 21 bp, synthetic construct
  misc_feature 1..21: note = Description of Artificial Sequence: Synthetic oligonucleotide
  source 1..21: mol_type = other DNA
ttggggcttcgtgataatact

SEQ ID NO: 43742 - DNA, 21 bp, synthetic construct
  misc_feature 1..21: note = Description of Artificial Sequence: Synthetic oligonucleotide
  source 1..21: mol_type = other DNA
agcagaaacgccgccaacgcc

SEQ ID NO: 43743 - DNA, 21 bp, synthetic construct
  misc_feature 1..21: note = Description of Artificial Sequence: Synthetic oligonucleotide
  source 1..21: mol_type = other DNA
caaaaccaaaacagcggcaga

SEQ ID NO: 43744 - DNA, 21 bp, synthetic construct
  misc_feature 1..21: note = Description of Artificial Sequence: Synthetic oligonucleotide
  source 1..21: mol_type = other DNA
tcggtttcgaatactaatact

SEQ ID NO: 43745 - DNA, 21 bp, synthetic construct
  misc_feature 1..21: note = Description of Artificial Sequence: Synthetic oligonucleotide
  source 1..21: mol_type = other DNA
gccagcagcagagaaagcctc

SEQ ID NO: 43746 - DNA, 21 bp, synthetic construct
  misc_feature 1..21: note = Description of Artificial Sequence: Synthetic oligonucleotide
  source 1..21: mol_type = other DNA
aaactcagccaaaccagccaa

SEQ ID NO: 43747 - DNA, 21 bp, synthetic construct
  misc_feature 1..21: note = Description of Artificial Sequence: Synthetic oligonucleotide
  source 1..21: mol_type = other DNA
agagacgtcggcagcgccgcc

SEQ ID NO: 43748 - DNA, 21 bp, synthetic construct
  misc_feature 1..21: note = Description of Artificial Sequence: Synthetic oligonucleotide
  source 1..21: mol_type = other DNA
aacagcagaagccaccacgaa

SEQ ID NO: 43749 - DNA, 21 bp, synthetic construct
  misc_feature 1..21: note = Description of Artificial Sequence: Synthetic oligonucleotide
  source 1..21: mol_type = other DNA
tctggtagtgataagtttagt

SEQ ID NO: 43750 - DNA, 21 bp, synthetic construct
  misc_feature 1..21: note = Description of Artificial Sequence: Synthetic oligonucleotide
  source 1..21: mol_type = other DNA
tctcatcctagttcttttggg

SEQ ID NO: 43751 - DNA, 21 bp, synthetic construct
  misc_feature 1..21: note = Description of Artificial Sequence: Synthetic oligonucleotide
  source 1..21: mol_type = other DNA
tctgggatgtctcgtcatgtt

SEQ ID NO: 43752 - DNA, 21 bp, synthetic construct
  misc_feature 1..21: note = Description of Artificial Sequence: Synthetic oligonucleotide
  source 1..21: mol_type = other DNA
gggccgactgatcataagctt

SEQ ID NO: 43753 - DNA, 21 bp, synthetic construct
  misc_feature 1..21: note = Description of Artificial Sequence: Synthetic oligonucleotide
  source 1..21: mol_type = other DNA
attaatgtgtcgaggagtacg

SEQ ID NO: 43754 - DNA, 21 bp, synthetic construct
  misc_feature 1..21: note = Description of Artificial Sequence: Synthetic oligonucleotide
  source 1..21: mol_type = other DNA
cccaaactcagccacaccggc

SEQ ID NO: 43755 - DNA, 21 bp, synthetic construct
  misc_feature 1..21: note = Description of Artificial Sequence: Synthetic oligonucleotide
  source 1..21: mol_type = other DNA
ttcaacatgcaaagaagccaa

SEQ ID NO: 43756 - DNA, 21 bp, synthetic construct
  misc_feature 1..21: note = Description of Artificial Sequence: Synthetic oligonucleotide
  source 1..21: mol_type = other DNA
gtgcctgtgactaagtcgagt

SEQ ID NO: 43757 - DNA, 21 bp, synthetic construct
  misc_feature 1..21: note = Description of Artificial Sequence: Synthetic oligonucleotide
  source 1..21: mol_type = other DNA
aacagcgccgccgccatgaaa

SEQ ID NO: 43758 - DNA, 21 bp, synthetic construct
  misc_feature 1..21: note = Description of Artificial Sequence: Synthetic oligonucleotide
  source 1..21: mol_type = other DNA
ctggtttctccgggtcatgtg

SEQ ID NO: 43759 - DNA, 21 bp, synthetic construct
  misc_feature 1..21: note = Description of Artificial Sequence: Synthetic oligonucleotide
  source 1..21: mol_type = other DNA
caagtcaccgtcagacccgtc

SEQ ID NO: 43760 - DNA, 21 bp, synthetic construct
  misc_feature 1..21: note = Description of Artificial Sequence: Synthetic oligonucleotide
  source 1..21: mol_type = other DNA
tacggcagcagagaaaacagc

SEQ ID NO: 43761 - DNA, 21 bp, synthetic construct
  misc_feature 1..21: note = Description of Artificial Sequence: Synthetic oligonucleotide
  source 1..21: mol_type = other DNA
caaagcagcaacgccagaaac

SEQ ID NO: 43762 - DNA, 21 bp, synthetic construct
  misc_feature 1..21: note = Description of Artificial Sequence: Synthetic oligonucleotide
  source 1..21: mol_type = other DNA
cgggctcctggtagtaatact

SEQ ID NO: 43763 - DNA, 21 bp, synthetic construct
  misc_feature 1..21: note = Description of Artificial Sequence: Synthetic oligonucleotide
  source 1..21: mol_type = other DNA
ttcaacagcggcagcggcaga

SEQ ID NO: 43764 - DNA, 21 bp, synthetic construct
  misc_feature 1..21: note = Description of Artificial Sequence: Synthetic oligonucleotide
  source 1..21: mol_type = other DNA
atgaattcgaatcatcggaat

SEQ ID NO: 43765 - DNA, 21 bp, synthetic construct
  misc_feature 1..21: note = Description of Artificial Sequence: Synthetic oligonucleotide
  source 1..21: mol_type = other DNA
atgggtcgtgagatgaagggt

SEQ ID NO: 43766 - DNA, 21 bp, synthetic construct
  misc_feature 1..21: note = Description of Artificial Sequence: Synthetic oligonucleotide
  source 1..21: mol_type = other DNA
gctgggccgttgaattctctt

SEQ ID NO: 43767 - DNA, 21 bp, synthetic construct
  misc_feature 1..21: note = Description of Artificial Sequence: Synthetic oligonucleotide
  source 1..21: mol_type = other DNA
aacaacgtccccctcatcaaa

SEQ ID NO: 43768 - DNA, 21 bp, synthetic construct
  misc_feature 1..21: note = Description of Artificial Sequence: Synthetic oligonucleotide
  source 1..21: mol_type = other DNA
caggctcagcatactcgttct

SEQ ID NO: 43769 - DNA, 21 bp, synthetic construct
  misc_feature 1..21: note = Description of Artificial Sequence: Synthetic oligonucleotide
  source 1..21: mol_type = other DNA
ggcaccgccagcggcgtcgcc

SEQ ID NO: 43770 - DNA, 21 bp, synthetic construct
  misc_feature 1..21: note = Description of Artificial Sequence: Synthetic oligonucleotide
  source 1..21: mol_type = other DNA
acgtcgactcttgattatctt

SEQ ID NO: 43771 - DNA, 21 bp, synthetic construct
  misc_feature 1..21: note = Description of Artificial Sequence: Synthetic oligonucleotide
  source 1..21: mol_type = other DNA
cctgggcctgaggttggtcgg

SEQ ID NO: 43772 - DNA, 21 bp, synthetic construct
  misc_feature 1..21: note = Description of Artificial Sequence: Synthetic oligonucleotide
  source 1..21: mol_type = other DNA
gtcaacgtcagcaccttcacc

SEQ ID NO: 43773 - DNA, 21 bp, synthetic construct
  misc_feature 1..21: note = Description of Artificial Sequence: Synthetic oligonucleotide
  source 1..21: mol_type = other DNA
accgccttccccggctacctc

SEQ ID NO: 43774 - DNA, 21 bp, synthetic construct
  misc_feature 1..21: note = Description of Artificial Sequence: Synthetic oligonucleotide
  source 1..21: mol_type = other DNA
caagtcagcgccaaaagcgcc

SEQ ID NO: 43775 - DNA, 21 bp, synthetic construct
  misc_feature 1..21: note = Description of Artificial Sequence: Synthetic oligonucleotide
  source 1..21: mol_type = other DNA
ctcgccatggaaagacaaaga

SEQ ID NO: 43776 - DNA, 21 bp, synthetic construct
  misc_feature 1..21: note = Description of Artificial Sequence: Synthetic oligonucleotide
  source 1..21: mol_type = other DNA
cttcctcagaggggtgttagt

SEQ ID NO: 43777 - DNA, 21 bp, synthetic construct
  misc_feature 1..21: note = Description of Artificial Sequence: Synthetic oligonucleotide
  source 1..21: mol_type = other DNA
cgttcgagtccggctagtttg

SEQ ID NO: 43778 - DNA, 21 bp, synthetic construct
  misc_feature 1..21: note = Description of Artificial Sequence: Synthetic oligonucleotide
  source 1..21: mol_type = other DNA
tggagcaacggcagaaccagc

SEQ ID NO: 43779 - DNA, 21 bp, synthetic construct
  misc_feature 1..21: note = Description of Artificial Sequence: Synthetic oligonucleotide
  source 1..21: mol_type = other DNA
tctaattcggcgtcgtatggt

SEQ ID NO: 43780 - DNA, 21 bp, synthetic construct
  misc_feature 1..21: note = Description of Artificial Sequence: Synthetic oligonucleotide
  source 1..21: mol_type = other DNA
cccagccaaaccaaacccagc

SEQ ID NO: 43781 - DNA, 21 bp, synthetic construct
  misc_feature 1..21: note = Description of Artificial Sequence: Synthetic oligonucleotide
  source 1..21: mol_type = other DNA
tacggcagcgaaagcaacaaa

SEQ ID NO: 43782 - DNA, 21 bp, synthetic construct
  misc_feature 1..21: note = Description of Artificial Sequence: Synthetic oligonucleotide
  source 1..21: mol_type = other DNA
gggcttagtcctgttcttaag

SEQ ID NO: 43783 - DNA, 21 bp, synthetic construct
  misc_feature 1..21: note = Description of Artificial Sequence: Synthetic oligonucleotide
  source 1..21: mol_type = other DNA
agggaggatactaagatgcat

SEQ ID NO: 43784 - DNA, 21 bp, synthetic construct
  misc_feature 1..21: note = Description of Artificial Sequence: Synthetic oligonucleotide
  source 1..21: mol_type = other DNA
aatgttttgagtaataagcat

SEQ ID NO: 43785 - DNA, 21 bp, synthetic construct
  misc_feature 1..21: note = Description of Artificial Sequence: Synthetic oligonucleotide
  source 1..21: mol_type = other DNA
agccaaagccaaacccccgaa

SEQ ID NO: 43786 - DNA, 21 bp, synthetic construct
  misc_feature 1..21: note = Description of Artificial Sequence: Synthetic oligonucleotide
  source 1..21: mol_type = other DNA
tcgtctaatggtaatattgtt

SEQ ID NO: 43787 - DNA, 21 bp, synthetic construct
  misc_feature 1..21: note = Description of Artificial Sequence: Synthetic oligonucleotide
  source 1..21: mol_type = other DNA
agtatttcgggtgagagggat

SEQ ID NO: 43788 - DNA, 21 bp, synthetic construct
  misc_feature 1..21: note = Description of Artificial Sequence: Synthetic oligonucleotide
  source 1..21: mol_type = other DNA
aaggatgcgtcttcttggttg

SEQ ID NO: 43789 - DNA, 21 bp, synthetic construct
  misc_feature 1..21: note = Description of Artificial Sequence: Synthetic oligonucleotide
  source 1..21: mol_type = other DNA
agtccgaattctcatccttct

SEQ ID NO: 43790 - DNA, 21 bp, synthetic construct
  misc_feature 1..21: note = Description of Artificial Sequence: Synthetic oligonucleotide
  source 1..21: mol_type = other DNA
agttctggtagtaataggtct

SEQ ID NO: 43791 - DNA, 21 bp, synthetic construct
  misc_feature 1..21: note = Description of Artificial Sequence: Synthetic oligonucleotide
  source 1..21: mol_type = other DNA
accacccaaagcagaagcctc

SEQ ID NO: 43792 - DNA, 21 bp, synthetic construct
  misc_feature 1..21: note = Description of Artificial Sequence: Synthetic oligonucleotide
  source 1..21: mol_type = other DNA
cccggcagaccccaaaccgac

SEQ ID NO: 43793 - DNA, 21 bp, synthetic construct
  misc_feature 1..21: note = Description of Artificial Sequence: Synthetic oligonucleotide
  source 1..21: mol_type = other DNA
tctgttcatcagaatcgggcg

SEQ ID NO: 43794 - DNA, 21 bp, synthetic construct
  misc_feature 1..21: note = Description of Artificial Sequence: Synthetic oligonucleotide
  source 1..21: mol_type = other DNA
gtgggggctcgtactgggggg

SEQ ID NO: 43795 - DNA, 21 bp, synthetic construct
  misc_feature 1..21: note = Description of Artificial Sequence: Synthetic oligonucleotide
  source 1..21: mol_type = other DNA
ggccccggcagaaacctcatc

SEQ ID NO: 43796 - DNA, 21 bp, synthetic construct
  misc_feature 1..21: note = Description of Artificial Sequence: Synthetic oligonucleotide
  source 1..21: mol_type = other DNA
aacggttctgtacagaatcaa

SEQ ID NO: 43797 - DNA, 21 bp, synthetic construct
  misc_feature 1..21: note = Description of Artificial Sequence: Synthetic oligonucleotide
  source 1..21: mol_type = other DNA
ggcttcgaaagaaacagagaa

SEQ ID NO: 43798 - DNA, 21 bp, synthetic construct
  misc_feature 1..21: note = Description of Artificial Sequence: Synthetic oligonucleotide
  source 1..21: mol_type = other DNA
gccacccacaccagcgtcagc

SEQ ID NO: 43799 - DNA, 21 bp, synthetic construct
  misc_feature 1..21: note = Description of Artificial Sequence: Synthetic oligonucleotide
  source 1..21: mol_type = other DNA
attggtaagaattctatggct

SEQ ID NO: 43800 - DNA, 21 bp, synthetic construct
  misc_feature 1..21: note = Description of Artificial Sequence: Synthetic oligonucleotide
  source 1..21: mol_type = other DNA
aatcgggttactcagagtagt

SEQ ID NO: 43801 - DNA, 21 bp, synthetic construct
  misc_feature 1..21: note = Description of Artificial Sequence: Synthetic oligonucleotide
  source 1..21: mol_type = other DNA
ggcgtcaacagaatccccgcc

SEQ ID NO: 43802 - DNA, 21 bp, synthetic construct
  misc_feature 1..21: note = Description of Artificial Sequence: Synthetic oligonucleotide
  source 1..21: mol_type = other DNA
gttacggcgaatcgtagtact

SEQ ID NO: 43803 - DNA, 21 bp, synthetic construct
  misc_feature 1..21: note = Description of Artificial Sequence: Synthetic oligonucleotide
  source 1..21: mol_type = other DNA
agctacgccgacaaacaaggc

SEQ ID NO: 43804 - DNA, 21 bp, synthetic construct
  misc_feature 1..21: note = Description of Artificial Sequence: Synthetic oligonucleotide
  source 1..21: mol_type = other DNA
ccgttgggtgctacgtttgcg

SEQ ID NO: 43805 - DNA, 21 bp, synthetic construct
  misc_feature 1..21: note = Description of Artificial Sequence: Synthetic oligonucleotide
  source 1..21: mol_type = other DNA
ctcaccgccaccaaccccaga

SEQ ID NO: 43806 - DNA, 21 bp, synthetic construct
  misc_feature 1..21: note = Description of Artificial Sequence: Synthetic oligonucleotide
  source 1..21: mol_type = other DNA
tgggacagcaaaacccccaga

SEQ ID NO: 43807 - DNA, 21 bp, synthetic construct
  misc_feature 1..21: note = Description of Artificial Sequence: Synthetic oligonucleotide
  source 1..21: mol_type = other DNA
cacaccagcaccaacaccatc

SEQ ID NO: 43808 - DNA, 21 bp, synthetic construct
  misc_feature 1..21: note = Description of Artificial Sequence: Synthetic oligonucleotide
  source 1..21: mol_type = other DNA
tctggtcgtgataagattagt

SEQ ID NO: 43809 - DNA, 21 bp, synthetic construct
  misc_feature 1..21: note = Description of Artificial Sequence: Synthetic oligonucleotide
  source 1..21: mol_type = other DNA
gtggatgttagggggatgtcg

SEQ ID NO: 43810 - DNA, 21 bp, synthetic construct
  misc_feature 1..21: note = Description of Artificial Sequence: Synthetic oligonucleotide
  source 1..21: mol_type = other DNA
atggtcagcagcaaaagcagc

SEQ ID NO: 43811 - DNA, 21 bp, synthetic construct
  misc_feature 1..21: note = Description of Artificial Sequence: Synthetic oligonucleotide
  source 1..21: mol_type = other DNA
aacgccctccccaacagaggc

SEQ ID NO: 43812 - DNA, 21 bp, synthetic construct
  misc_feature 1..21: note = Description of Artificial Sequence: Synthetic oligonucleotide
  source 1..21: mol_type = other DNA
atcaacagcctcagcagcaaa

SEQ ID NO: 43813 - DNA, 21 bp, synthetic construct
  misc_feature 1..21: note = Description of Artificial Sequence: Synthetic oligonucleotide
  source 1..21: mol_type = other DNA
agtggtcagcattctttgaat

SEQ ID NO: 43814 - DNA, 21 bp, synthetic construct
  misc_feature 1..21: note = Description of Artificial Sequence: Synthetic oligonucleotide
  source 1..21: mol_type = other DNA
tatgctatggagagggttggg

SEQ ID NO: 43815 - DNA, 21 bp, synthetic construct
  misc_feature 1..21: note = Description of Artificial Sequence: Synthetic oligonucleotide
  source 1..21: mol_type = other DNA
aacggcagcggccaagaccaa

SEQ ID NO: 43816 - DNA, 21 bp, synthetic construct
  misc_feature 1..21: note = Description of Artificial Sequence: Synthetic oligonucleotide
  source 1..21: mol_type = other DNA
gacagagccggcaaacaaagc

SEQ ID NO: 43817 - DNA, 21 bp, synthetic construct
  misc_feature 1..21: note = Description of Artificial Sequence: Synthetic oligonucleotide
  source 1..21: mol_type = other DNA
ggtggggttccttctaggctt

SEQ ID NO: 43818 - DNA, 21 bp, synthetic construct
  misc_feature 1..21: note = Description of Artificial Sequence: Synthetic oligonucleotide
  source 1..21: mol_type = other DNA
ggtgtgtctgcgacggtgaag

SEQ ID NO: 43819 - DNA, 21 bp, synthetic construct
  misc_feature 1..21: note = Description of Artificial Sequence: Synthetic oligonucleotide
  source 1..21: mol_type = other DNA
gactacagcgaaaccagaaga

SEQ ID NO: 43820 - DNA, 21 bp, synthetic construct
  misc_feature 1..21: note = Description of Artificial Sequence: Synthetic oligonucleotide
  source 1..21: mol_type = other DNA
atcacccccagcaacatcggc

SEQ ID NO: 43821 - DNA, 21 bp, synthetic construct
  misc_feature 1..21: note = Description of Artificial Sequence: Synthetic oligonucleotide
  source 1..21: mol_type = other DNA
atggctacgtctactcgtaat

SEQ ID NO: 43822 - DNA, 21 bp, synthetic construct
  misc_feature 1..21: note = Description of Artificial Sequence: Synthetic oligonucleotide
  source 1..21: mol_type = other DNA
atgagccacaccaaaagcaac

SEQ ID NO: 43823 - DNA, 21 bp, synthetic construct
  misc_feature 1..21: note = Description of Artificial Sequence: Synthetic oligonucleotide
  source 1..21: mol_type = other DNA
atgaatcgtaatggttcgctg

SEQ ID NO: 43824 - DNA, 21 bp, synthetic construct
  misc_feature 1..21: note = Description of Artificial Sequence: Synthetic oligonucleotide
  source 1..21: mol_type = other DNA
gacatcatgagccccctcaaa

SEQ ID NO: 43825 - DNA, 21 bp, synthetic construct
  misc_feature 1..21: note = Description of Artificial Sequence: Synthetic oligonucleotide
  source 1..21: mol_type = other DNA
aataagtcgaatgggcagtcg

SEQ ID NO: 43826 - DNA, 21 bp, synthetic construct
  misc_feature 1..21: note = Description of Artificial Sequence: Synthetic oligonucleotide
  source 1..21: mol_type = other DNA
cctgggacgccttcttctggt

SEQ ID NO: 43827 - DNA, 21 bp, synthetic construct
  misc_feature 1..21: note = Description of Artificial Sequence: Synthetic oligonucleotide
  source 1..21: mol_type = other DNA
tctagtgttcggccgtatgct

SEQ ID NO: 43828 - DNA, 21 bp, synthetic construct
  misc_feature 1..21: note = Description of Artificial Sequence: Synthetic oligonucleotide
  source 1..21: mol_type = other DNA
atgagaagcggcacccacaac

SEQ ID NO: 43829 - DNA, 21 bp, synthetic construct
  misc_feature 1..21: note = Description of Artificial Sequence: Synthetic oligonucleotide
  source 1..21: mol_type = other DNA
ggcacccccaacaccaaagtc

SEQ ID NO: 43830 - DNA, 21 bp, synthetic construct
  misc_feature 1..21: note = Description of Artificial Sequence: Synthetic oligonucleotide
  source 1..21: mol_type = other DNA
cccggcctcagagacaccgcc

SEQ ID NO: 43831 - DNA, 21 bp, synthetic construct
  misc_feature 1..21: note = Description of Artificial Sequence: Synthetic oligonucleotide
  source 1..21: mol_type = other DNA
tctactacgggtgattcgaag

SEQ ID NO: 43832 - DNA, 21 bp, synthetic construct
  misc_feature 1..21: note = Description of Artificial Sequence: Synthetic oligonucleotide
  source 1..21: mol_type = other DNA
acgagtaagcctaattctccg

SEQ ID NO: 43833 - DNA, 21 bp, synthetic construct
  misc_feature 1..21: note = Description of Artificial Sequence: Synthetic oligonucleotide
  source 1..21: mol_type = other DNA
aattctggtactcattttaag

SEQ ID NO: 43834 - DNA, 21 bp, synthetic construct
  misc_feature 1..21: note = Description of Artificial Sequence: Synthetic oligonucleotide
  source 1..21: mol_type = other DNA
tatggttctcctgtgcatcag

SEQ ID NO: 43835 - DNA, 21 bp, synthetic construct
  misc_feature 1..21: note = Description of Artificial Sequence: Synthetic oligonucleotide
  source 1..21: mol_type = other DNA
ttcaccttcaacgccgccacc

SEQ ID NO: 43836 - DNA, 21 bp, synthetic construct
  misc_feature 1..21: note = Description of Artificial Sequence: Synthetic oligonucleotide
  source 1..21: mol_type = other DNA
gctggtgagaataagctgagt

SEQ ID NO: 43837 - DNA, 21 bp, synthetic construct
  misc_feature 1..21: note = Description of Artificial Sequence: Synthetic oligonucleotide
  source 1..21: mol_type = other DNA
cttattcgtggtgggaataat

SEQ ID NO: 43838 - DNA, 21 bp, synthetic construct
  misc_feature 1..21: note = Description of Artificial Sequence: Synthetic oligonucleotide
  source 1..21: mol_type = other DNA
ggtagtaataggaatcctctt

SEQ ID NO: 43839 - DNA, 21 bp, synthetic construct
  misc_feature 1..21: note = Description of Artificial Sequence: Synthetic oligonucleotide
  source 1..21: mol_type = other DNA
atcaccgccacccacgcccac

SEQ ID NO: 43840 - DNA, 21 bp, synthetic construct
  misc_feature 1..21: note = Description of Artificial Sequence: Synthetic oligonucleotide
  source 1..21: mol_type = other DNA
gacgactaccaacacaaaggc

SEQ ID NO: 43841 - DNA, 21 bp, synthetic construct
  misc_feature 1..21: note = Description of Artificial Sequence: Synthetic oligonucleotide
  source 1..21: mol_type = other DNA
caggtgacggctattggtgct

SEQ ID NO: 43842 - DNA, 21 bp, synthetic construct
  misc_feature 1..21: note = Description of Artificial Sequence: Synthetic oligonucleotide
  source 1..21: mol_type = other DNA
tctaatcggccttctattgtg

SEQ ID NO: 43843 - DNA, 21 bp, synthetic construct
  misc_feature 1..21: note = Description of Artificial Sequence: Synthetic oligonucleotide
  source 1..21: mol_type = other DNA
ttccccaccagccccaccaga

SEQ ID NO: 43844 - DNA, 21 bp, synthetic construct
  misc_feature 1..21: note = Description of Artificial Sequence: Synthetic oligonucleotide
  source 1..21: mol_type = other DNA
ccgacgaggaatgggaatatg

SEQ ID NO: 43845 - DNA, 21 bp, synthetic construct
  misc_feature 1..21: note = Description of Artificial Sequence: Synthetic oligonucleotide
  source 1..21: mol_type = other DNA
gttcttcataatgctagtagt

SEQ ID NO: 43846 - DNA, 21 bp, synthetic construct
  misc_feature 1..21: note = Description of Artificial Sequence: Synthetic oligonucleotide
  source 1..21: mol_type = other DNA
gtcctcagcagcagccccaaa

SEQ ID NO: 43847 - DNA, 21 bp, synthetic construct
  misc_feature 1..21: note = Description of Artificial Sequence: Synthetic oligonucleotide
  source 1..21: mol_type = other DNA
cagagtaaggctggtaattcg

SEQ ID NO: 43848 - DNA, 21 bp, synthetic construct
  misc_feature 1..21: note = Description of Artificial Sequence: Synthetic oligonucleotide
  source 1..21: mol_type = other DNA
caaaccagccacagcgccaaa

SEQ ID NO: 43849 - DNA, 21 bp, synthetic construct
  misc_feature 1..21: note = Description of Artificial Sequence: Synthetic oligonucleotide
  source 1..21: mol_type = other DNA
gacatcagaaacctccaaaga

SEQ ID NO: 43850 - DNA, 21 bp, synthetic construct
  misc_feature 1..21: note = Description of Artificial Sequence: Synthetic oligonucleotide
  source 1..21: mol_type = other DNA
gcgacgagtcctcggttgtct

SEQ ID NO: 43851 - DNA, 21 bp, synthetic construct
  misc_feature 1..21: note = Description of Artificial Sequence: Synthetic oligonucleotide
  source 1..21: mol_type = other DNA
gccttcggcggcgaaaccaaa

SEQ ID NO: 43852 - DNA, 21 bp, synthetic construct
  misc_feature 1..21: note = Description of Artificial Sequence: Synthetic oligonucleotide
  source 1..21: mol_type = other DNA
tcgtctcaggcgcagccgact

SEQ ID NO: 43853 - DNA, 21 bp, synthetic construct
  misc_feature 1..21: note = Description of Artificial Sequence: Synthetic oligonucleotide
  source 1..21: mol_type = other DNA
accgtcctcggcagcagctac

SEQ ID NO: 43854 - DNA, 21 bp, synthetic construct
  misc_feature 1..21: note = Description of Artificial Sequence: Synthetic oligonucleotide
  source 1..21: mol_type = other DNA
tttcgtccttctactgtggtg

SEQ ID NO: 43855 - DNA, 21 bp, synthetic construct
  misc_feature 1..21: note = Description of Artificial Sequence: Synthetic oligonucleotide
  source 1..21: mol_type = other DNA
agtgctcattctcttgggatt

SEQ ID NO: 43856 - DNA, 21 bp, synthetic construct
  misc_feature 1..21: note = Description of Artificial Sequence: Synthetic oligonucleotide
  source 1..21: mol_type = other DNA
agtaggtcggttactgcgagg

SEQ ID NO: 43857 - DNA, 21 bp, synthetic construct
  misc_feature 1..21: note = Description of Artificial Sequence: Synthetic oligonucleotide
  source 1..21: mol_type = other DNA
gccggcaccagcaaagacatc

SEQ ID NO: 43858 - DNA, 21 bp, synthetic construct
  misc_feature 1..21: note = Description of Artificial Sequence: Synthetic oligonucleotide
  source 1..21: mol_type = other DNA
gtgactggtagtgtgtcggat

SEQ ID NO: 43859 - DNA, 21 bp, synthetic construct
  misc_feature 1..21: note = Description of Artificial Sequence: Synthetic oligonucleotide
  source 1..21: mol_type = other DNA
tctgggaatagtcataatggg

SEQ ID NO: 43860 - DNA, 21 bp, synthetic construct
  misc_feature 1..21: note = Description of Artificial Sequence: Synthetic oligonucleotide
  source 1..21: mol_type = other DNA
ggtccgcatactgcggttggt

SEQ ID NO: 43861 - DNA, 21 bp, synthetic construct
  misc_feature 1..21: note = Description of Artificial Sequence: Synthetic oligonucleotide
  source 1..21: mol_type = other DNA
ggcagacaaagccaacccaga

SEQ ID NO: 43862 - DNA, 21 bp, synthetic construct
  misc_feature 1..21: note = Description of Artificial Sequence: Synthetic oligonucleotide
  source 1..21: mol_type = other DNA
ctgaggcctaatgggcagctt

SEQ ID NO: 43863 - DNA, 21 bp, synthetic construct
  misc_feature 1..21: note = Description of Artificial Sequence: Synthetic oligonucleotide
  source 1..21: mol_type = other DNA
agaatgaaaagcctcgacaac

SEQ ID NO: 43864 - DNA, 21 bp, synthetic construct
  misc_feature 1..21: note = Description of Artificial Sequence: Synthetic oligonucleotide
  source 1..21: mol_type = other DNA
aatgtgaatagtcagatgctg

SEQ ID NO: 43865 - DNA, 21 bp, synthetic construct
  misc_feature 1..21: note = Description of Artificial Sequence: Synthetic oligonucleotide
  source 1..21: mol_type = other DNA
agtttttcgtcgactatgggt

SEQ ID NO: 43866 - DNA, 21 bp, synthetic construct
  misc_feature 1..21: note = Description of Artificial Sequence: Synthetic oligonucleotide
  source 1..21: mol_type = other DNA
gggaataatcggccggcttcg

SEQ ID NO: 43867 - DNA, 21 bp, synthetic construct
  misc_feature 1..21: note = Description of Artificial Sequence: Synthetic oligonucleotide
  source 1..21: mol_type = other DNA
gggcagactggtgatatgcgt

SEQ ID NO: 43868 - DNA, 21 bp, synthetic construct
  misc_feature 1..21: note = Description of Artificial Sequence: Synthetic oligonucleotide
  source 1..21: mol_type = other DNA
actaatccgaatccgcatagg

SEQ ID NO: 43869 - DNA, 21 bp, synthetic construct
  misc_feature 1..21: note = Description of Artificial Sequence: Synthetic oligonucleotide
  source 1..21: mol_type = other DNA
atccccctcagcagccaaaga

SEQ ID NO: 43870 - DNA, 21 bp, synthetic construct
  misc_feature 1..21: note = Description of Artificial Sequence: Synthetic oligonucleotide
  source 1..21: mol_type = other DNA
agtggtgttgagcgggttaat

SEQ ID NO: 43871 - DNA, 21 bp, synthetic construct
  misc_feature 1..21: note = Description of Artificial Sequence: Synthetic oligonucleotide
  source 1..21: mol_type = other DNA
tttaattcttcttctggtagt

SEQ ID NO: 43872 - DNA, 21 bp, synthetic construct
  misc_feature 1..21: note = Description of Artificial Sequence: Synthetic oligonucleotide
  source 1..21: mol_type = other DNA
catattgggtctccgcatacg

SEQ ID NO: 43873 - DNA, 21 bp, synthetic construct
  misc_feature 1..21: note = Description of Artificial Sequence: Synthetic oligonucleotide
  source 1..21: mol_type = other DNA
ggcagcggccacggcaccaac

SEQ ID NO: 43874 - DNA, 21 bp, synthetic construct
  misc_feature 1..21: note = Description of Artificial Sequence: Synthetic oligonucleotide
  source 1..21: mol_type = other DNA
agtacgcatgatcatagtagg

SEQ ID NO: 43875 - DNA, 21 bp, synthetic construct
  misc_feature 1..21: note = Description of Artificial Sequence: Synthetic oligonucleotide
  source 1..21: mol_type = other DNA
cctcttcagcagaatcggtct

SEQ ID NO: 43876 - DNA, 21 bp, synthetic construct
  misc_feature 1..21: note = Description of Artificial Sequence: Synthetic oligonucleotide
  source 1..21: mol_type = other DNA
atgatggggggtgttaagaat

SEQ ID NO: 43877 - DNA, 21 bp, synthetic construct
  misc_feature 1..21: note = Description of Artificial Sequence: Synthetic oligonucleotide
  source 1..21: mol_type = other DNA
aatcctgttgctctgagggat

SEQ ID NO: 43878 - DNA, 21 bp, synthetic construct
  misc_feature 1..21: note = Description of Artificial Sequence: Synthetic oligonucleotide
  source 1..21: mol_type = other DNA
cttttggatcggagggctgct

SEQ ID NO: 43879 - DNA, 21 bp, synthetic construct
  misc_feature 1..21: note = Description of Artificial Sequence: Synthetic oligonucleotide
  source 1..21: mol_type = other DNA
aggtcgatggggaattcttcg

SEQ ID NO: 43880 - DNA, 21 bp, synthetic construct
  misc_feature 1..21: note = Description of Artificial Sequence: Synthetic oligonucleotide
  source 1..21: mol_type = other DNA
aaacaacccgacagcacccac

SEQ ID NO: 43881 - DNA, 21 bp, synthetic construct
  misc_feature 1..21: note = Description of Artificial Sequence: Synthetic oligonucleotide
  source 1..21: mol_type = other DNA
actcagggtgcgagtaatttg

SEQ ID NO: 43882 - DNA, 21 bp, synthetic construct
  misc_feature 1..21: note = Description of Artificial Sequence: Synthetic oligonucleotide
  source 1..21: mol_type = other DNA
cgtaattatacgggtgatagt

SEQ ID NO: 43883 - DNA, 21 bp, synthetic construct
  misc_feature 1..21: note = Description of Artificial Sequence: Synthetic oligonucleotide
  source 1..21: mol_type = other DNA
gggactattaatggtattacg

SEQ ID NO: 43884 - DNA, 21 bp, synthetic construct
  misc_feature 1..21: note = Description of Artificial Sequence: Synthetic oligonucleotide
  source 1..21: mol_type = other DNA
gttcctggtaatttgccttct

SEQ ID NO: 43885 - DNA, 21 bp, synthetic construct
  misc_feature 1..21: note = Description of Artificial Sequence: Synthetic oligonucleotide
  source 1..21: mol_type = other DNA
gacagaagcagagtcctcggc

SEQ ID NO: 43886 - DNA, 21 bp, synthetic construct
  misc_feature 1..21: note = Description of Artificial Sequence: Synthetic oligonucleotide
  source 1..21: mol_type = other DNA
tctgatattaatcggtctact

SEQ ID NO: 43887 - DNA, 21 bp, synthetic construct
  misc_feature 1..21: note = Description of Artificial Sequence: Synthetic oligonucleotide
  source 1..21: mol_type = other DNA
ccttctgtggcgaatgttatg

SEQ ID NO: 43888 - DNA, 21 bp, synthetic construct
  misc_feature 1..21: note = Description of Artificial Sequence: Synthetic oligonucleotide
  source 1..21: mol_type = other DNA
caattccccgacgaaaccctc

SEQ ID NO: 43889 - DNA, 21 bp, synthetic construct
  misc_feature 1..21: note = Description of Artificial Sequence: Synthetic oligonucleotide
  source 1..21: mol_type = other DNA
tcgagtttggagaagtctaat

SEQ ID NO: 43890 - DNA, 21 bp, synthetic construct
  misc_feature 1..21: note = Description of Artificial Sequence: Synthetic oligonucleotide
  source 1..21: mol_type = other DNA
attggtactagtccgatgaag

SEQ ID NO: 43891 - DNA, 21 bp, synthetic construct
  misc_feature 1..21: note = Description of Artificial Sequence: Synthetic oligonucleotide
  source 1..21: mol_type = other DNA
cctgttacgaggttgtcggag

SEQ ID NO: 43892 - DNA, 21 bp, synthetic construct
  misc_feature 1..21: note = Description of Artificial Sequence: Synthetic oligonucleotide
  source 1..21: mol_type = other DNA
gatcgtcaggggttgtctggg

SEQ ID NO: 43893 - DNA, 21 bp, synthetic construct
  misc_feature 1..21: note = Description of Artificial Sequence: Synthetic oligonucleotide
  source 1..21: mol_type = other DNA
acccaaggcagcagactcagc

SEQ ID NO: 43894 - DNA, 21 bp, synthetic construct
  misc_feature 1..21: note = Description of Artificial Sequence: Synthetic oligonucleotide
  source 1..21: mol_type = other DNA
agagacagaaccaacgccgcc

SEQ ID NO: 43895 - DNA, 21 bp, synthetic construct
  misc_feature 1..21: note = Description of Artificial Sequence: Synthetic oligonucleotide
  source 1..21: mol_type = other DNA
gtcagcagaagcgccaccaac

SEQ ID NO: 43896 - DNA, 21 bp, synthetic construct
  misc_feature 1..21: note = Description of Artificial Sequence: Synthetic oligonucleotide
  source 1..21: mol_type = other DNA
aatgtttcgagtgcgattaag

SEQ ID NO: 43897 - DNA, 21 bp, synthetic construct
  misc_feature 1..21: note = Description of Artificial Sequence: Synthetic oligonucleotide
  source 1..21: mol_type = other DNA
ccgcattctgggaatcgtcat

SEQ ID NO: 43898 - DNA, 21 bp, synthetic construct
  misc_feature 1..21: note = Description of Artificial Sequence: Synthetic oligonucleotide
  source 1..21: mol_type = other DNA
taccccagcaccccccacaga

SEQ ID NO: 43899 - DNA, 21 bp, synthetic construct
  misc_feature 1..21: note = Description of Artificial Sequence: Synthetic oligonucleotide
  source 1..21: mol_type = other DNA
tcgaaggctacgcataatatt

SEQ ID NO: 43900 - DNA, 21 bp, synthetic construct
  misc_feature 1..21: note = Description of Artificial Sequence: Synthetic oligonucleotide
  source 1..21: mol_type = other DNA
gagctggctgcgccttctaag

SEQ ID NO: 43901 - DNA, 21 bp, synthetic construct
  misc_feature 1..21: note = Description of Artificial Sequence: Synthetic oligonucleotide
  source 1..21: mol_type = other DNA
ccggttggtactaagtctggt

SEQ ID NO: 43902 - DNA, 21 bp, synthetic construct
  misc_feature 1..21: note = Description of Artificial Sequence: Synthetic oligonucleotide
  source 1..21: mol_type = other DNA
agttctagtcgggggcagaat

SEQ ID NO: 43903 - DNA, 21 bp, synthetic construct
  misc_feature 1..21: note = Description of Artificial Sequence: Synthetic oligonucleotide
  source 1..21: mol_type = other DNA
caagtcagccccctcaacgcc

SEQ ID NO: 43904 - DNA, 21 bp, synthetic construct
  misc_feature 1..21: note = Description of Artificial Sequence: Synthetic oligonucleotide
  source 1..21: mol_type = other DNA
tacggcgccagccccagcctc

SEQ ID NO: 43905 - DNA, 21 bp, synthetic construct
  misc_feature 1..21: note = Description of Artificial Sequence: Synthetic oligonucleotide
  source 1..21: mol_type = other DNA
tataatgcttcgactaatgtg

SEQ ID NO: 43906 - DNA, 21 bp, synthetic construct
  misc_feature 1..21: note = Description of Artificial Sequence: Synthetic oligonucleotide
  source 1..21: mol_type = other DNA
tcttcgagggcttctcaggat

SEQ ID NO: 43907 - DNA, 21 bp, synthetic construct
  misc_feature 1..21: note = Description of Artificial Sequence: Synthetic oligonucleotide
  source 1..21: mol_type = other DNA
ctcacccccagcaacatgggc

SEQ ID NO: 43908 - DNA, 21 bp, synthetic construct
  misc_feature 1..21: note = Description of Artificial Sequence: Synthetic oligonucleotide
  source 1..21: mol_type = other DNA
gtgttggcgggtagtaatact

SEQ ID NO: 43909 - DNA, 21 bp, synthetic construct
  misc_feature 1..21: note = Description of Artificial Sequence: Synthetic oligonucleotide
  source 1..21: mol_type = other DNA
cccagcggcgaaaccagcaaa

SEQ ID NO: 43910 - DNA, 21 bp, synthetic construct
  misc_feature 1..21: note = Description of Artificial Sequence: Synthetic oligonucleotide
  source 1..21: mol_type = other DNA
ggcgtcaacaccggcacccaa

SEQ ID NO: 43911 - DNA, 21 bp, synthetic construct
  misc_feature 1..21: note = Description of Artificial Sequence: Synthetic oligonucleotide
  source 1..21: mol_type = other DNA
agtcatatgacgggggttact

SEQ ID NO: 43912 - DNA, 21 bp, synthetic construct
  misc_feature 1..21: note = Description of Artificial Sequence: Synthetic oligonucleotide
  source 1..21: mol_type = other DNA
gtggctcatcggcctcagctg

SEQ ID NO: 43913 - DNA, 21 bp, synthetic construct
  misc_feature 1..21: note = Description of Artificial Sequence: Synthetic oligonucleotide
  source 1..21: mol_type = other DNA
gggacggatagtaagaggcat

SEQ ID NO: 43914 - DNA, 21 bp, synthetic construct
  misc_feature 1..21: note = Description of Artificial Sequence: Synthetic oligonucleotide
  source 1..21: mol_type = other DNA
ggcacctacggcgaaatgaga

SEQ ID NO: 43915 - DNA, 21 bp, synthetic construct
  misc_feature 1..21: note = Description of Artificial Sequence: Synthetic oligonucleotide
  source 1..21: mol_type = other DNA
cctcagaatctggctcatgtt

SEQ ID NO: 43916 - DNA, 21 bp, synthetic construct
  misc_feature 1..21: note = Description of Artificial Sequence: Synthetic oligonucleotide
  source 1..21: mol_type = other DNA
cctagtgctaggatgtctggt

SEQ ID NO: 43917 - DNA, 21 bp, synthetic construct
  misc_feature 1..21: note = Description of Artificial Sequence: Synthetic oligonucleotide
  source 1..21: mol_type = other DNA
tcgcataattcgaaggattct

SEQ ID NO: 43918 - DNA, 21 bp, synthetic construct
  misc_feature 1..21: note = Description of Artificial Sequence: Synthetic oligonucleotide
  source 1..21: mol_type = other DNA
tttgtttcggctcgtagtggt

SEQ ID NO: 43919 - DNA, 21 bp, synthetic construct
  misc_feature 1..21: note = Description of Artificial Sequence: Synthetic oligonucleotide
  source 1..21: mol_type = other DNA
cttaattcgacggcgggtaag

SEQ ID NO: 43920 - DNA, 21 bp, synthetic construct
  misc_feature 1..21: note = Description of Artificial Sequence: Synthetic oligonucleotide
  source 1..21: mol_type = other DNA
cgtgatccgaaggcgggtgtt

SEQ ID NO: 43921 - DNA, 21 bp, synthetic construct
  misc_feature 1..21: note = Description of Artificial Sequence: Synthetic oligonucleotide
  source 1..21: mol_type = other DNA
catcagagtagttcgagttcg

SEQ ID NO: 43922 - DNA, 21 bp, synthetic construct
  misc_feature 1..21: note = Description of Artificial Sequence: Synthetic oligonucleotide
  source 1..21: mol_type = other DNA
gatattgggaatcctactaat

SEQ ID NO: 43923 - DNA, 21 bp, synthetic construct
  misc_feature 1..21: note = Description of Artificial Sequence: Synthetic oligonucleotide
  source 1..21: mol_type = other DNA
tctagtcctgtgagtgctgtt

SEQ ID NO: 43924 - DNA, 21 bp, synthetic construct
  misc_feature 1..21: note = Description of Artificial Sequence: Synthetic oligonucleotide
  source 1..21: mol_type = other DNA
gcccaccaaagacccatccaa

SEQ ID NO: 43925 - DNA, 21 bp, synthetic construct
  misc_feature 1..21: note = Description of Artificial Sequence: Synthetic oligonucleotide
  source 1..21: mol_type = other DNA
ggtaatgggatttctactaag

SEQ ID NO: 43926 - DNA, 21 bp, synthetic construct
  misc_feature 1..21: note = Description of Artificial Sequence: Synthetic oligonucleotide
  source 1..21: mol_type = other DNA
aatggttctacttcttctggt

SEQ ID NO: 43927 - DNA, 21 bp, synthetic construct
  misc_feature 1..21: note = Description of Artificial Sequence: Synthetic oligonucleotide
  source 1..21: mol_type = other DNA
caacccagccaaggccacagc

SEQ ID NO: 43928 - DNA, 21 bp, synthetic construct
  misc_feature 1..21: note = Description of Artificial Sequence: Synthetic oligonucleotide
  source 1..21: mol_type = other DNA
tcgatggcttcggcgtataag

SEQ ID NO: 43929 - DNA, 21 bp, synthetic construct
  misc_feature 1..21: note = Description of Artificial Sequence: Synthetic oligonucleotide
  source 1..21: mol_type = other DNA
accaacggcggcagagtcacc

SEQ ID NO: 43930 - DNA, 21 bp, synthetic construct
  misc_feature 1..21: note = Description of Artificial Sequence: Synthetic oligonucleotide
  source 1..21: mol_type = other DNA
aaaagagtcacctacaccgac

SEQ ID NO: 43931 - DNA, 21 bp, synthetic construct
  misc_feature 1..21: note = Description of Artificial Sequence: Synthetic oligonucleotide
  source 1..21: mol_type = other DNA
gccagagacgaccaaagaaga

SEQ ID NO: 43932 - DNA, 21 bp, synthetic construct
  misc_feature 1..21: note = Description of Artificial Sequence: Synthetic oligonucleotide
  source 1..21: mol_type = other DNA
attcctgcgtcgtcgtcgggt

SEQ ID NO: 43933 - DNA, 21 bp, synthetic construct
  misc_feature 1..21: note = Description of Artificial Sequence: Synthetic oligonucleotide
  source 1..21: mol_type = other DNA
tgtgtgactggtggtcttact

SEQ ID NO: 43934 - DNA, 21 bp, synthetic construct
  misc_feature 1..21: note = Description of Artificial Sequence: Synthetic oligonucleotide
  source 1..21: mol_type = other DNA
gttaatggtaagatttgttcg

SEQ ID NO: 43935 - DNA, 21 bp, synthetic construct
  misc_feature 1..21: note = Description of Artificial Sequence: Synthetic oligonucleotide
  source 1..21: mol_type = other DNA
gcgactggttctcctagtaag

SEQ ID NO: 43936 - DNA, 21 bp, synthetic construct
  misc_feature 1..21: note = Description of Artificial Sequence: Synthetic oligonucleotide
  source 1..21: mol_type = other DNA
gtgcctggtaagtctgcgcag

SEQ ID NO: 43937 - DNA, 21 bp, synthetic construct
  misc_feature 1..21: note = Description of Artificial Sequence: Synthetic oligonucleotide
  source 1..21: mol_type = other DNA
acccccagcgtcagcaccaaa

SEQ ID NO: 43938 - DNA, 21 bp, synthetic construct
  misc_feature 1..21: note = Description of Artificial Sequence: Synthetic oligonucleotide
  source 1..21: mol_type = other DNA
agaaccctcaacctcaacacc

SEQ ID NO: 43939 - DNA, 21 bp, synthetic construct
  misc_feature 1..21: note = Description of Artificial Sequence: Synthetic oligonucleotide
  source 1..21: mol_type = other DNA
tcggatatgtctggtcagcgt

SEQ ID NO: 43940 - DNA, 21 bp, synthetic construct
  misc_feature 1..21: note = Description of Artificial Sequence: Synthetic oligonucleotide
  source 1..21: mol_type = other DNA
agtactggtaaggctacttgt

SEQ ID NO: 43941 - DNA, 21 bp, synthetic construct
  misc_feature 1..21: note = Description of Artificial Sequence: Synthetic oligonucleotide
  source 1..21: mol_type = other DNA
ggccccagcagccccagactc

SEQ ID NO: 43942 - DNA, 21 bp, synthetic construct
  misc_feature 1..21: note = Description of Artificial Sequence: Synthetic oligonucleotide
  source 1..21: mol_type = other DNA
cccagaaccaacaaccccagc

SEQ ID NO: 43943 - DNA, 21 bp, synthetic construct
  misc_feature 1..21: note = Description of Artificial Sequence: Synthetic oligonucleotide
  source 1..21: mol_type = other DNA
ggtggtaatgataggtttcgg

SEQ ID NO: 43944 - DNA, 21 bp, synthetic construct
  misc_feature 1..21: note = Description of Artificial Sequence: Synthetic oligonucleotide
  source 1..21: mol_type = other DNA
accatcagcaccagacaaagc

SEQ ID NO: 43945 - DNA, 21 bp, synthetic construct
  misc_feature 1..21: note = Description of Artificial Sequence: Synthetic oligonucleotide
  source 1..21: mol_type = other DNA
caaggcaccaccgccagaagc

SEQ ID NO: 43946 - DNA, 21 bp, synthetic construct
  misc_feature 1..21: note = Description of Artificial Sequence: Synthetic oligonucleotide
  source 1..21: mol_type = other DNA
gaactcagaaccaacgccctc

SEQ ID NO: 43947 - DNA, 21 bp, synthetic construct
  misc_feature 1..21: note = Description of Artificial Sequence: Synthetic oligonucleotide
  source 1..21: mol_type = other DNA
actggggtttcgcctctggct

SEQ ID NO: 43948 - DNA, 21 bp, synthetic construct
  misc_feature 1..21: note = Description of Artificial Sequence: Synthetic oligonucleotide
  source 1..21: mol_type = other DNA
tctcatgcgacggctgctact

SEQ ID NO: 43949 - DNA, 21 bp, synthetic construct
  misc_feature 1..21: note = Description of Artificial Sequence: Synthetic oligonucleotide
  source 1..21: mol_type = other DNA
tcgagttcgcgtaatgtggct

SEQ ID NO: 43950 - DNA, 21 bp, synthetic construct
  misc_feature 1..21: note = Description of Artificial Sequence: Synthetic oligonucleotide
  source 1..21: mol_type = other DNA
ggcatcaacagcagaggcagc

SEQ ID NO: 43951 - DNA, 21 bp, synthetic construct
  misc_feature 1..21: note = Description of Artificial Sequence: Synthetic oligonucleotide
  source 1..21: mol_type = other DNA
atggatgggaggtcgactact

SEQ ID NO: 43952 - DNA, 21 bp, synthetic construct
  misc_feature 1..21: note = Description of Artificial Sequence: Synthetic oligonucleotide
  source 1..21: mol_type = other DNA
gaaagacccggcggcaccccc

SEQ ID NO: 43953 - DNA, 21 bp, synthetic construct
  misc_feature 1..21: note = Description of Artificial Sequence: Synthetic oligonucleotide
  source 1..21: mol_type = other DNA
atccccagcggcgtccacagc

SEQ ID NO: 43954 - DNA, 21 bp, synthetic construct
  misc_feature 1..21: note = Description of Artificial Sequence: Synthetic oligonucleotide
  source 1..21: mol_type = other DNA
cctgtgggttctggtgtgcct

SEQ ID NO: 43955 - DNA, 21 bp, synthetic construct
  misc_feature 1..21: note = Description of Artificial Sequence: Synthetic oligonucleotide
  source 1..21: mol_type = other DNA
gatgcgcgtactatggcggct

SEQ ID NO: 43956 - DNA, 21 bp, synthetic construct
  misc_feature 1..21: note = Description of Artificial Sequence: Synthetic oligonucleotide
  source 1..21: mol_type = other DNA
tatggttcgaatacgccgact

SEQ ID NO: 43957 - DNA, 21 bp, synthetic construct
  misc_feature 1..21: note = Description of Artificial Sequence: Synthetic oligonucleotide
  source 1..21: mol_type = other DNA
agagtcctcagcaacgaaacc

SEQ ID NO: 43958 - DNA, 21 bp, synthetic construct
  misc_feature 1..21: note = Description of Artificial Sequence: Synthetic oligonucleotide
  source 1..21: mol_type = other DNA
agcgccatcagaaacgtcacc

SEQ ID NO: 43959 - DNA, 21 bp, synthetic construct
  misc_feature 1..21: note = Description of Artificial Sequence: Synthetic oligonucleotide
  source 1..21: mol_type = other DNA
agtgggtctctttcttctgct

SEQ ID NO: 43960 - DNA, 21 bp, synthetic construct
  misc_feature 1..21: note = Description of Artificial Sequence: Synthetic oligonucleotide
  source 1..21: mol_type = other DNA
gttcagccggtgaagatgagt

SEQ ID NO: 43961 - DNA, 21 bp, synthetic construct
  misc_feature 1..21: note = Description of Artificial Sequence: Synthetic oligonucleotide
  source 1..21: mol_type = other DNA
accagaagcaaagaaagcccc

SEQ ID NO: 43962 - DNA, 21 bp, synthetic construct
  misc_feature 1..21: note = Description of Artificial Sequence: Synthetic oligonucleotide
  source 1..21: mol_type = other DNA
agccccggcaaactcaccacc

SEQ ID NO: 43963 - DNA, 21 bp, synthetic construct
  misc_feature 1..21: note = Description of Artificial Sequence: Synthetic oligonucleotide
  source 1..21: mol_type = other DNA
gttagttcgaatgctagtatg

SEQ ID NO: 43964 - DNA, 21 bp, synthetic construct
  misc_feature 1..21: note = Description of Artificial Sequence: Synthetic oligonucleotide
  source 1..21: mol_type = other DNA
gccatgggccaccccctcgcc

SEQ ID NO: 43965 - DNA, 21 bp, synthetic construct
  misc_feature 1..21: note = Description of Artificial Sequence: Synthetic oligonucleotide
  source 1..21: mol_type = other DNA
atgagttctaagcaggttagt

SEQ ID NO: 43966 - DNA, 21 bp, synthetic construct
  misc_feature 1..21: note = Description of Artificial Sequence: Synthetic oligonucleotide
  source 1..21: mol_type = other DNA
tcgattagtacgcgtacgggg

SEQ ID NO: 43967 - DNA, 21 bp, synthetic construct
  misc_feature 1..21: note = Description of Artificial Sequence: Synthetic oligonucleotide
  source 1..21: mol_type = other DNA
ggcaaccccagccccctcgtc

SEQ ID NO: 43968 - DNA, 21 bp, synthetic construct
  misc_feature 1..21: note = Description of Artificial Sequence: Synthetic oligonucleotide
  source 1..21: mol_type = other DNA
ggcgtcaccggcacccacgtc

SEQ ID NO: 43969 - DNA, 21 bp, synthetic construct
  misc_feature 1..21: note = Description of Artificial Sequence: Synthetic oligonucleotide
  source 1..21: mol_type = other DNA
ctcggcaccagccccatgaaa

SEQ ID NO: 43970 - DNA, 21 bp, synthetic construct
  misc_feature 1..21: note = Description of Artificial Sequence: Synthetic oligonucleotide
  source 1..21: mol_type = other DNA
tcgactcatcatccggctagt

SEQ ID NO: 43971 - DNA, 21 bp, synthetic construct
  misc_feature 1..21: note = Description of Artificial Sequence: Synthetic oligonucleotide
  source 1..21: mol_type = other DNA
gtcgccggcgccgcccaaaga

SEQ ID NO: 43972 - DNA, 21 bp, synthetic construct
  misc_feature 1..21: note = Description of Artificial Sequence: Synthetic oligonucleotide
  source 1..21: mol_type = other DNA
gggcctcgttctatgtctaat

SEQ ID NO: 43973 - DNA, 21 bp, synthetic construct
  misc_feature 1..21: note = Description of Artificial Sequence: Synthetic oligonucleotide
  source 1..21: mol_type = other DNA
tcgccgcgggcgagtcttaat

SEQ ID NO: 43974 - DNA, 21 bp, synthetic construct
  misc_feature 1..21: note = Description of Artificial Sequence: Synthetic oligonucleotide
  source 1..21: mol_type = other DNA
tctattacgtctgttactaat

SEQ ID NO: 43975 - DNA, 21 bp, synthetic construct
  misc_feature 1..21: note = Description of Artificial Sequence: Synthetic oligonucleotide
  source 1..21: mol_type = other DNA
atgggcgccggcgccctcacc

SEQ ID NO: 43976 - DNA, 21 bp, synthetic construct
  misc_feature 1..21: note = Description of Artificial Sequence: Synthetic oligonucleotide
  source 1..21: mol_type = other DNA
tacgccatcgaaagagtcggc

SEQ ID NO: 43977 - DNA, 21 bp, synthetic construct
  misc_feature 1..21: note = Description of Artificial Sequence: Synthetic oligonucleotide
  source 1..21: mol_type = other DNA
cctactagtaatgggagtctt

SEQ ID NO: 43978 - DNA, 21 bp, synthetic construct
  misc_feature 1..21: note = Description of Artificial Sequence: Synthetic oligonucleotide
  source 1..21: mol_type = other DNA
ctcaccccccccggcgtcggc

SEQ ID NO: 43979 - DNA, 21 bp, synthetic construct
  misc_feature 1..21: note = Description of Artificial Sequence: Synthetic oligonucleotide
  source 1..21: mol_type = other DNA
tctccgcatcgggatacggtt

SEQ ID NO: 43980 - DNA, 21 bp, synthetic construct
  misc_feature 1..21: note = Description of Artificial Sequence: Synthetic oligonucleotide
  source 1..21: mol_type = other DNA
gctgtggagtcgtctagttct

SEQ ID NO: 43981 - DNA, 21 bp, synthetic construct
  misc_feature 1..21: note = Description of Artificial Sequence: Synthetic oligonucleotide
  source 1..21: mol_type = other DNA
ggtacttctccttccacgatg

SEQ ID NO: 43982 - DNA, 21 bp, synthetic construct
  misc_feature 1..21: note = Description of Artificial Sequence: Synthetic oligonucleotide
  source 1..21: mol_type = other DNA
gaccccggcaccagaaaaagc

SEQ ID NO: 43983 - DNA, 21 bp, synthetic construct
  misc_feature 1..21: note = Description of Artificial Sequence: Synthetic oligonucleotide
  source 1..21: mol_type = other DNA
gtggtgaggaattctgtttcg

SEQ ID NO: 43984 - DNA, 21 bp, synthetic construct
  misc_feature 1..21: note = Description of Artificial Sequence: Synthetic oligonucleotide
  source 1..21: mol_type = other DNA
cggaagatggttccttatagt

SEQ ID NO: 43985 - DNA, 21 bp, synthetic construct
  misc_feature 1..21: note = Description of Artificial Sequence: Synthetic oligonucleotide
  source 1..21: mol_type = other DNA
tgtcagggtcagggtgtgtct

SEQ ID NO: 43986 - DNA, 21 bp, synthetic construct
  misc_feature 1..21: note = Description of Artificial Sequence: Synthetic oligonucleotide
  source 1..21: mol_type = other DNA
agaatcgccggccccaccgtc

SEQ ID NO: 43987 - DNA, 21 bp, synthetic construct
  misc_feature 1..21: note = Description of Artificial Sequence: Synthetic oligonucleotide
  source 1..21: mol_type = other DNA
attatttcgcagcatgggatg

SEQ ID NO: 43988 - DNA, 21 bp, synthetic construct
  misc_feature 1..21: note = Description of Artificial Sequence: Synthetic oligonucleotide
  source 1..21: mol_type = other DNA
ggtaattctacggcgaatagg

SEQ ID NO: 43989 - DNA, 21 bp, synthetic construct
  misc_feature 1..21: note = Description of Artificial Sequence: Synthetic oligonucleotide
  source 1..21: mol_type = other DNA
agtccggggcgtacgcagagt

SEQ ID NO: 43990 - DNA, 21 bp, synthetic construct
  misc_feature 1..21: note = Description of Artificial Sequence: Synthetic oligonucleotide
  source 1..21: mol_type = other DNA
cccatcagcgaaagcaccaga

SEQ ID NO: 43991 - DNA, 21 bp, synthetic construct
  misc_feature 1..21: note = Description of Artificial Sequence: Synthetic oligonucleotide
  source 1..21: mol_type = other DNA
tctagtggtttgtcgtcgtct

SEQ ID NO: 43992 - DNA, 21 bp, synthetic construct
  misc_feature 1..21: note = Description of Artificial Sequence: Synthetic oligonucleotide
  source 1..21: mol_type = other DNA
gaaagaaacggcaacttcacc

SEQ ID NO: 43993 - DNA, 21 bp, synthetic construct
  misc_feature 1..21: note = Description of Artificial Sequence: Synthetic oligonucleotide
  source 1..21: mol_type = other DNA
ggtcattctcagtcgcatcag

SEQ ID NO: 43994 - DNA, 21 bp, synthetic construct
  misc_feature 1..21: note = Description of Artificial Sequence: Synthetic oligonucleotide
  source 1..21: mol_type = other DNA
gggagtcttggtgctctgact

SEQ ID NO: 43995 - DNA, 21 bp, synthetic construct
  misc_feature 1..21: note = Description of Artificial Sequence: Synthetic oligonucleotide
  source 1..21: mol_type = other DNA
atgagacaaaccgccagcctc

SEQ ID NO: 43996 - DNA, 21 bp, synthetic construct
  misc_feature 1..21: note = Description of Artificial Sequence: Synthetic oligonucleotide
  source 1..21: mol_type = other DNA
ggccaaaacagaaacaacacc

SEQ ID NO: 43997 - DNA, 21 bp, synthetic construct
  misc_feature 1..21: note = Description of Artificial Sequence: Synthetic oligonucleotide
  source 1..21: mol_type = other DNA
ctgcagagtgggggtcatagg

SEQ ID NO: 43998 - DNA, 21 bp, synthetic construct
  misc_feature 1..21: note = Description of Artificial Sequence: Synthetic oligonucleotide
  source 1..21: mol_type = other DNA
gccgtcaacaccaaagccctc

SEQ ID NO: 43999 - DNA, 21 bp, synthetic construct
  misc_feature 1..21: note = Description of Artificial Sequence: Synthetic oligonucleotide
  source 1..21: mol_type = other DNA
atggggggtgttacgtcttct

SEQ ID NO: 44000 - DNA, 21 bp, synthetic construct
  misc_feature 1..21: note = Description of Artificial Sequence: Synthetic oligonucleotide
  source 1..21: mol_type = other DNA
gagaataatagtcgtgctact

SEQ ID NO: 44001 - DNA, 21 bp, synthetic construct
  misc_feature 1..21: note = Description of Artificial Sequence: Synthetic oligonucleotide
  source 1..21: mol_type = other DNA
cagatgcctggtcatactggg

SEQ ID NO: 44002 - DNA, 21 bp, synthetic construct
  misc_feature 1..21: note = Description of Artificial Sequence: Synthetic oligonucleotide
  source 1..21: mol_type = other DNA
aagcctcaggggagtctggtt

SEQ ID NO: 44003 - DNA, 21 bp, synthetic construct
  misc_feature 1..21: note = Description of Artificial Sequence: Synthetic oligonucleotide
  source 1..21: mol_type = other DNA
gggactggtgttccggggaag

SEQ ID NO: 44004 - DNA, 21 bp, synthetic construct
  misc_feature 1..21: note = Description of Artificial Sequence: Synthetic oligonucleotide
  source 1..21: mol_type = other DNA
ggcagagacaacagcagacaa

SEQ ID NO: 44005 - DNA, 21 bp, synthetic construct
  misc_feature 1..21: note = Description of Artificial Sequence: Synthetic oligonucleotide
  source 1..21: mol_type = other DNA
agcggcaacgacaaaaacaac

SEQ ID NO: 44006 - DNA, 21 bp, synthetic construct
  misc_feature 1..21: note = Description of Artificial Sequence: Synthetic oligonucleotide
  source 1..21: mol_type = other DNA
tctgttaattctcggagtgag

SEQ ID NO: 44007 - DNA, 21 bp, synthetic construct
  misc_feature 1..21: note = Description of Artificial Sequence: Synthetic oligonucleotide
  source 1..21: mol_type = other DNA
gtgactcatggtcggcctggg

SEQ ID NO: 44008 - DNA, 21 bp, synthetic construct
  misc_feature 1..21: note = Description of Artificial Sequence: Synthetic oligonucleotide
  source 1..21: mol_type = other DNA
tcgaattctgatagggcgaat

SEQ ID NO: 44009 - DNA, 21 bp, synthetic construct
  misc_feature 1..21: note = Description of Artificial Sequence: Synthetic oligonucleotide
  source 1..21: mol_type = other DNA
catactactggtattcttggg

SEQ ID NO: 44010 - DNA, 21 bp, synthetic construct
  misc_feature 1..21: note = Description of Artificial Sequence: Synthetic oligonucleotide
  source 1..21: mol_type = other DNA
ggcagagtcgtcagcatgcaa

SEQ ID NO: 44011 - DNA, 21 bp, synthetic construct
  misc_feature 1..21: note = Description of Artificial Sequence: Synthetic oligonucleotide
  source 1..21: mol_type = other DNA
agcggcccccaacccgtcgcc

SEQ ID NO: 44012 - DNA, 21 bp, synthetic construct
  misc_feature 1..21: note = Description of Artificial Sequence: Synthetic oligonucleotide
  source 1..21: mol_type = other DNA
acgccgacgactagtgcgaat

SEQ ID NO: 44013 - DNA, 21 bp, synthetic construct
  misc_feature 1..21: note = Description of Artificial Sequence: Synthetic oligonucleotide
  source 1..21: mol_type = other DNA
cgtcaggatagtactcctggg

SEQ ID NO: 44014 - DNA, 21 bp, synthetic construct
  misc_feature 1..21: note = Description of Artificial Sequence: Synthetic oligonucleotide
  source 1..21: mol_type = other DNA
catcagcctcatcagaatcag

SEQ ID NO: 44015 - DNA, 21 bp, synthetic construct
  misc_feature 1..21: note = Description of Artificial Sequence: Synthetic oligonucleotide
  source 1..21: mol_type = other DNA
gggatgattccttcgtctagg

SEQ ID NO: 44016 - DNA, 21 bp, synthetic construct
  misc_feature 1..21: note = Description of Artificial Sequence: Synthetic oligonucleotide
  source 1..21: mol_type = other DNA
agaaccgccagcagcctcccc

SEQ ID NO: 44017 - DNA, 21 bp, synthetic construct
  misc_feature 1..21: note = Description of Artificial Sequence: Synthetic oligonucleotide
  source 1..21: mol_type = other DNA
cttgagaggaatggtttgaag

SEQ ID NO: 44018 - DNA, 21 bp, synthetic construct
  misc_feature 1..21: note = Description of Artificial Sequence: Synthetic oligonucleotide
  source 1..21: mol_type = other DNA
cacatgaaacacctccaagtc

SEQ ID NO: 44019 - DNA, 21 bp, synthetic construct
  misc_feature 1..21: note = Description of Artificial Sequence: Synthetic oligonucleotide
  source 1..21: mol_type = other DNA
gccaccatcggccacaacaga

SEQ ID NO: 44020 - DNA, 21 bp, synthetic construct
  misc_feature 1..21: note = Description of Artificial Sequence: Synthetic oligonucleotide
  source 1..21: mol_type = other DNA
cacgcccacagcaacgtcggc

SEQ ID NO: 44021 - DNA, 21 bp, synthetic construct
  misc_feature 1..21: note = Description of Artificial Sequence: Synthetic oligonucleotide
  source 1..21: mol_type = other DNA
tctaatcgtcagcatggtctt

SEQ ID NO: 44022 - DNA, 21 bp, synthetic construct
  misc_feature 1..21: note = Description of Artificial Sequence: Synthetic oligonucleotide
  source 1..21: mol_type = other DNA
tcgtctatgtcgcatcagaag

SEQ ID NO: 44023 - DNA, 21 bp, synthetic construct
  misc_feature 1..21: note = Description of Artificial Sequence: Synthetic oligonucleotide
  source 1..21: mol_type = other DNA
tatcattcgaagggtacgact

SEQ ID NO: 44024 - DNA, 21 bp, synthetic construct
  misc_feature 1..21: note = Description of Artificial Sequence: Synthetic oligonucleotide
  source 1..21: mol_type = other DNA
tatcaggttccgttggctaag

SEQ ID NO: 44025 - DNA, 21 bp, synthetic construct
  misc_feature 1..21: note = Description of Artificial Sequence: Synthetic oligonucleotide
  source 1..21: mol_type = other DNA
ctgtctcgtcagcataattcg

SEQ ID NO: 44026 - DNA, 21 bp, synthetic construct
  misc_feature 1..21: note = Description of Artificial Sequence: Synthetic oligonucleotide
  source 1..21: mol_type = other DNA
aacagttctggacagaatcaa

SEQ ID NO: 44027 - DNA, 21 bp, synthetic construct
  misc_feature 1..21: note = Description of Artificial Sequence: Synthetic oligonucleotide
  source 1..21: mol_type = other DNA
cctcatcagcgtgctgggtct

SEQ ID NO: 44028 - DNA, 21 bp, synthetic construct
  misc_feature 1..21: note = Description of Artificial Sequence: Synthetic oligonucleotide
  source 1..21: mol_type = other DNA
gccctcagaaccagcaactac

SEQ ID NO: 44029 - DNA, 21 bp, synthetic construct
  misc_feature 1..21: note = Description of Artificial Sequence: Synthetic oligonucleotide
  source 1..21: mol_type = other DNA
gataatactggtcgtaatgct

SEQ ID NO: 44030 - DNA, 21 bp, synthetic construct
  misc_feature 1..21: note = Description of Artificial Sequence: Synthetic oligonucleotide
  source 1..21: mol_type = other DNA
cattctcatgggaagtcgatt

SEQ ID NO: 44031 - DNA, 21 bp, synthetic construct
  misc_feature 1..21: note = Description of Artificial Sequence: Synthetic oligonucleotide
  source 1..21: mol_type = other DNA
aaaaccagcaccccctacagc

SEQ ID NO: 44032 - DNA, 21 bp, synthetic construct
  misc_feature 1..21: note = Description of Artificial Sequence: Synthetic oligonucleotide
  source 1..21: mol_type = other DNA
atgtctttgcctggtcagcgg

SEQ ID NO: 44033 - DNA, 21 bp, synthetic construct
  misc_feature 1..21: note = Description of Artificial Sequence: Synthetic oligonucleotide
  source 1..21: mol_type = other DNA
catatgaatcgtaagcttgag

SEQ ID NO: 44034 - DNA, 21 bp, synthetic construct
  misc_feature 1..21: note = Description of Artificial Sequence: Synthetic oligonucleotide
  source 1..21: mol_type = other DNA
ggggggtcgaattctaggctg

SEQ ID NO: 44035 - DNA, 21 bp, synthetic construct
  misc_feature 1..21: note = Description of Artificial Sequence: Synthetic oligonucleotide
  source 1..21: mol_type = other DNA
agaagcgaccccaccagaggc

SEQ ID NO: 44036 - DNA, 21 bp, synthetic construct
  misc_feature 1..21: note = Description of Artificial Sequence: Synthetic oligonucleotide
  source 1..21: mol_type = other DNA
agagacagcaccaaactcgtc

SEQ ID NO: 44037 - DNA, 21 bp, synthetic construct
  misc_feature 1..21: note = Description of Artificial Sequence: Synthetic oligonucleotide
  source 1..21: mol_type = other DNA
catgttgttgagcagtttaag

SEQ ID NO: 44038 - DNA, 21 bp, synthetic construct
  misc_feature 1..21: note = Description of Artificial Sequence: Synthetic oligonucleotide
  source 1..21: mol_type = other DNA
aaaaccaacagcgaaagcatg

SEQ ID NO: 44039 - DNA, 21 bp, synthetic construct
  misc_feature 1..21: note = Description of Artificial Sequence: Synthetic oligonucleotide
  source 1..21: mol_type = other DNA
agtcgtaagaataatacgttg

SEQ ID NO: 44040 - DNA, 21 bp, synthetic construct
  misc_feature 1..21: note = Description of Artificial Sequence: Synthetic oligonucleotide
  source 1..21: mol_type = other DNA
tcgcataataggacgaatgat

SEQ ID NO: 44041 - DNA, 21 bp, synthetic construct
  misc_feature 1..21: note = Description of Artificial Sequence: Synthetic oligonucleotide
  source 1..21: mol_type = other DNA
cagtctatttctcatacgcgt

SEQ ID NO: 44042 - DNA, 21 bp, synthetic construct
  misc_feature 1..21: note = Description of Artificial Sequence: Synthetic oligonucleotide
  source 1..21: mol_type = other DNA
acgaataattctcatcattcc

SEQ ID NO: 44043 - DNA, 21 bp, synthetic construct
  misc_feature 1..21: note = Description of Artificial Sequence: Synthetic oligonucleotide
  source 1..21: mol_type = other DNA
agcctcaacagcagagaaggc

SEQ ID NO: 44044 - DNA, 21 bp, synthetic construct
  misc_feature 1..21: note = Description of Artificial Sequence: Synthetic oligonucleotide
  source 1..21: mol_type = other DNA
agcaacgtcagcaaaccccaa

SEQ ID NO: 44045 - DNA, 21 bp, synthetic construct
  misc_feature 1..21: note = Description of Artificial Sequence: Synthetic oligonucleotide
  source 1..21: mol_type = other DNA
actgagactcggtcggcgaat

SEQ ID NO: 44046 - DNA, 21 bp, synthetic construct
  misc_feature 1..21: note = Description of Artificial Sequence: Synthetic oligonucleotide
  source 1..21: mol_type = other DNA
tataatgggggtaatcgtagt

SEQ ID NO: 44047 - DNA, 21 bp, synthetic construct
  misc_feature 1..21: note = Description of Artificial Sequence: Synthetic oligonucleotide
  source 1..21: mol_type = other DNA
ctgaatcattcgaagtattcg

SEQ ID NO: 44048 - DNA, 21 bp, synthetic construct
  misc_feature 1..21: note = Description of Artificial Sequence: Synthetic oligonucleotide
  source 1..21: mol_type = other DNA
gaccccctcagaagcatgcac

SEQ ID NO: 44049 - DNA, 21 bp, synthetic construct
  misc_feature 1..21: note = Description of Artificial Sequence: Synthetic oligonucleotide
  source 1..21: mol_type = other DNA
attacgagtactggttctagt

SEQ ID NO: 44050 - DNA, 21 bp, synthetic construct
  misc_feature 1..21: note = Description of Artificial Sequence: Synthetic oligonucleotide
  source 1..21: mol_type = other DNA
tacgccagcagcagagacggc

SEQ ID NO: 44051 - DNA, 21 bp, synthetic construct
  misc_feature 1..21: note = Description of Artificial Sequence: Synthetic oligonucleotide
  source 1..21: mol_type = other DNA
ttcgccagaagcgccagcagc

SEQ ID NO: 44052 - DNA, 21 bp, synthetic construct
  misc_feature 1..21: note = Description of Artificial Sequence: Synthetic oligonucleotide
  source 1..21: mol_type = other DNA
atgggtcataaggtggaggcg

SEQ ID NO: 44053 - DNA, 21 bp, synthetic construct
  misc_feature 1..21: note = Description of Artificial Sequence: Synthetic oligonucleotide
  source 1..21: mol_type = other DNA
gatacggcgactcgtaatagg

SEQ ID NO: 44054 - DNA, 21 bp, synthetic construct
  misc_feature 1..21: note = Description of Artificial Sequence: Synthetic oligonucleotide
  source 1..21: mol_type = other DNA
acgttttctaagggtactaat

SEQ ID NO: 44055 - DNA, 21 bp, synthetic construct
  misc_feature 1..21: note = Description of Artificial Sequence: Synthetic oligonucleotide
  source 1..21: mol_type = other DNA
atgagagccaaccacaccagc

SEQ ID NO: 44056 - DNA, 21 bp, synthetic construct
  misc_feature 1..21: note = Description of Artificial Sequence: Synthetic oligonucleotide
  source 1..21: mol_type = other DNA
accagcaccagccccatgaaa

SEQ ID NO: 44057 - DNA, 21 bp, synthetic construct
  misc_feature 1..21: note = Description of Artificial Sequence: Synthetic oligonucleotide
  source 1..21: mol_type = other DNA
tctactccgcatcatacgact

SEQ ID NO: 44058 - DNA, 21 bp, synthetic construct
  misc_feature 1..21: note = Description of Artificial Sequence: Synthetic oligonucleotide
  source 1..21: mol_type = other DNA
ctcggccaccaaggccacctc

SEQ ID NO: 44059 - DNA, 21 bp, synthetic construct
  misc_feature 1..21: note = Description of Artificial Sequence: Synthetic oligonucleotide
  source 1..21: mol_type = other DNA
gccgccaccagacaacccgac

SEQ ID NO: 44060 - DNA, 21 bp, synthetic construct
  misc_feature 1..21: note = Description of Artificial Sequence: Synthetic oligonucleotide
  source 1..21: mol_type = other DNA
attacgggtaatcgtcatagt

SEQ ID NO: 44061 - DNA, 21 bp, synthetic construct
  misc_feature 1..21: note = Description of Artificial Sequence: Synthetic oligonucleotide
  source 1..21: mol_type = other DNA
aacagcggcccccccaaaccc

SEQ ID NO: 44062 - DNA, 21 bp, synthetic construct
  misc_feature 1..21: note = Description of Artificial Sequence: Synthetic oligonucleotide
  source 1..21: mol_type = other DNA
tgccaaagcagcagagtcacc

SEQ ID NO: 44063 - DNA, 21 bp, synthetic construct
  misc_feature 1..21: note = Description of Artificial Sequence: Synthetic oligonucleotide
  source 1..21: mol_type = other DNA
agtgcggggacttcggttggt

SEQ ID NO: 44064 - DNA, 21 bp, synthetic construct
  misc_feature 1..21: note = Description of Artificial Sequence: Synthetic oligonucleotide
  source 1..21: mol_type = other DNA
agtccttcttcgcctcatgat

SEQ ID NO: 44065 - DNA, 21 bp, synthetic construct
  misc_feature 1..21: note = Description of Artificial Sequence: Synthetic oligonucleotide
  source 1..21: mol_type = other DNA
cttagggctgagcatgttagg

SEQ ID NO: 44066 - DNA, 21 bp, synthetic construct
  misc_feature 1..21: note = Description of Artificial Sequence: Synthetic oligonucleotide
  source 1..21: mol_type = other DNA
tttgcgaatactgctaatagg

SEQ ID NO: 44067 - DNA, 21 bp, synthetic construct
  misc_feature 1..21: note = Description of Artificial Sequence: Synthetic oligonucleotide
  source 1..21: mol_type = other DNA
aatgcgcttcctgtgactcag

SEQ ID NO: 44068 - DNA, 21 bp, synthetic construct
  misc_feature 1..21: note = Description of Artificial Sequence: Synthetic oligonucleotide
  source 1..21: mol_type = other DNA
cgtgcttctggtgttactaat

SEQ ID NO: 44069 - DNA, 21 bp, synthetic construct
  misc_feature 1..21: note = Description of Artificial Sequence: Synthetic oligonucleotide
  source 1..21: mol_type = other DNA
cctccgagtaatgggaggctt

SEQ ID NO: 44070 - DNA, 21 bp, synthetic construct
  misc_feature 1..21: note = Description of Artificial Sequence: Synthetic oligonucleotide
  source 1..21: mol_type = other DNA
ggtgttaggagtgtggctggg

SEQ ID NO: 44071 - DNA, 21 bp, synthetic construct
  misc_feature 1..21: note = Description of Artificial Sequence: Synthetic oligonucleotide
  source 1..21: mol_type = other DNA
ttggggtctagtactattttg

SEQ ID NO: 44072 - DNA, 21 bp, synthetic construct
  misc_feature 1..21: note = Description of Artificial Sequence: Synthetic oligonucleotide
  source 1..21: mol_type = other DNA
cattcggttaatggtcatagt

SEQ ID NO: 44073 - DNA, 21 bp, synthetic construct
  misc_feature 1..21: note = Description of Artificial Sequence: Synthetic oligonucleotide
  source 1..21: mol_type = other DNA
ttgggggctagtactattttg

SEQ ID NO: 44074 - DNA, 21 bp, synthetic construct
  misc_feature 1..21: note = Description of Artificial Sequence: Synthetic oligonucleotide
  source 1..21: mol_type = other DNA
tgcctcagcagcagcgccaaa

SEQ ID NO: 44075 - DNA, 21 bp, synthetic construct
  misc_feature 1..21: note = Description of Artificial Sequence: Synthetic oligonucleotide
  source 1..21: mol_type = other DNA
gaacccgtcaccagcaaaagc

SEQ ID NO: 44076 - DNA, 21 bp, synthetic construct
  misc_feature 1..21: note = Description of Artificial Sequence: Synthetic oligonucleotide
  source 1..21: mol_type = other DNA
gagatgagggttgagaggccg

SEQ ID NO: 44077 - DNA, 21 bp, synthetic construct
  misc_feature 1..21: note = Description of Artificial Sequence: Synthetic oligonucleotide
  source 1..21: mol_type = other DNA
tatagtaagcagaatttgact

SEQ ID NO: 44078 - DNA, 21 bp, synthetic construct
  misc_feature 1..21: note = Description of Artificial Sequence: Synthetic oligonucleotide
  source 1..21: mol_type = other DNA
gacggccaagaaagaagcagc

SEQ ID NO: 44079 - DNA, 21 bp, synthetic construct
  misc_feature 1..21: note = Description of Artificial Sequence: Synthetic oligonucleotide
  source 1..21: mol_type = other DNA
ctcagcaaacaagcctactgc

SEQ ID NO: 44080 - DNA, 21 bp, synthetic construct
  misc_feature 1..21: note = Description of Artificial Sequence: Synthetic oligonucleotide
  source 1..21: mol_type = other DNA
accggcatcaccaaactcagc

SEQ ID NO: 44081 - DNA, 21 bp, synthetic construct
  misc_feature 1..21: note = Description of Artificial Sequence: Synthetic oligonucleotide
  source 1..21: mol_type = other DNA
aatcgggttggttcgatttct

SEQ ID NO: 44082 - DNA, 21 bp, synthetic construct
  misc_feature 1..21: note = Description of Artificial Sequence: Synthetic oligonucleotide
  source 1..21: mol_type = other DNA
gctcctagtgcgggtatgtct

SEQ ID NO: 44083 - DNA, 21 bp, synthetic construct
  misc_feature 1..21: note = Description of Artificial Sequence: Synthetic oligonucleotide
  source 1..21: mol_type = other DNA
cattcgggtacgaggactagt

SEQ ID NO: 44084 - DNA, 21 bp, synthetic construct
  misc_feature 1..21: note = Description of Artificial Sequence: Synthetic oligonucleotide
  source 1..21: mol_type = other DNA
tctcctaataatcggggtatg

SEQ ID NO: 44085 - DNA, 21 bp, synthetic construct
  misc_feature 1..21: note = Description of Artificial Sequence: Synthetic oligonucleotide
  source 1..21: mol_type = other DNA
cccagcgtcagaaccctcggc

SEQ ID NO: 44086 - DNA, 21 bp, synthetic construct
  misc_feature 1..21: note = Description of Artificial Sequence: Synthetic oligonucleotide
  source 1..21: mol_type = other DNA
cgtgagaataatactagttct

SEQ ID NO: 44087 - DNA, 21 bp, synthetic construct
  misc_feature 1..21: note = Description of Artificial Sequence: Synthetic oligonucleotide
  source 1..21: mol_type = other DNA
cagcctactcagaggatgggt

SEQ ID NO: 44088 - DNA, 21 bp, synthetic construct
  misc_feature 1..21: note = Description of Artificial Sequence: Synthetic oligonucleotide
  source 1..21: mol_type = other DNA
caggagggtgtgcgtagttct

SEQ ID NO: 44089 - DNA, 21 bp, synthetic construct
  misc_feature 1..21: note = Description of Artificial Sequence: Synthetic oligonucleotide
  source 1..21: mol_type = other DNA
tggaccggcgtcccccccagc

SEQ ID NO: 44090 - DNA, 21 bp, synthetic construct
  misc_feature 1..21: note = Description of Artificial Sequence: Synthetic oligonucleotide
  source 1..21: mol_type = other DNA
caacccaccaccagcgccctc

SEQ ID NO: 44091 - DNA, 21 bp, synthetic construct
  misc_feature 1..21: note = Description of Artificial Sequence: Synthetic oligonucleotide
  source 1..21: mol_type = other DNA
cacgccaccagcggcaccaga

SEQ ID NO: 44092 - DNA, 21 bp, synthetic construct
  misc_feature 1..21: note = Description of Artificial Sequence: Synthetic oligonucleotide
  source 1..21: mol_type = other DNA
gacagagtcaccggcaaaatg

SEQ ID NO: 44093 - DNA, 21 bp, synthetic construct
  misc_feature 1..21: note = Description of Artificial Sequence: Synthetic oligonucleotide
  source 1..21: mol_type = other DNA
tctactttttctccttctaag

SEQ ID NO: 44094 - DNA, 21 bp, synthetic construct
  misc_feature 1..21: note = Description of Artificial Sequence: Synthetic oligonucleotide
  source 1..21: mol_type = other DNA
caaagaaacgtcagcgtcgtc

SEQ ID NO: 44095 - DNA, 21 bp, synthetic construct
  misc_feature 1..21: note = Description of Artificial Sequence: Synthetic oligonucleotide
  source 1..21: mol_type = other DNA
gacagccccaacagaggcaga

SEQ ID NO: 44096 - DNA, 21 bp, synthetic construct
  misc_feature 1..21: note = Description of Artificial Sequence: Synthetic oligonucleotide
  source 1..21: mol_type = other DNA
attcctcatgcggggacggcg

SEQ ID NO: 44097 - DNA, 21 bp, synthetic construct
  misc_feature 1..21: note = Description of Artificial Sequence: Synthetic oligonucleotide
  source 1..21: mol_type = other DNA
agccacacccccaaactcgtc

SEQ ID NO: 44098 - DNA, 21 bp, synthetic construct
  misc_feature 1..21: note = Description of Artificial Sequence: Synthetic oligonucleotide
  source 1..21: mol_type = other DNA
tttcttaagggtactggttcg

SEQ ID NO: 44099 - DNA, 21 bp, synthetic construct
  misc_feature 1..21: note = Description of Artificial Sequence: Synthetic oligonucleotide
  source 1..21: mol_type = other DNA
agcagaagcaccggcaccctc

SEQ ID NO: 44100 - DNA, 21 bp, synthetic construct
  misc_feature 1..21: note = Description of Artificial Sequence: Synthetic oligonucleotide
  source 1..21: mol_type = other DNA
agtcctcttcttgattataag

SEQ ID NO: 44101 - DNA, 21 bp, synthetic construct
  misc_feature 1..21: note = Description of Artificial Sequence: Synthetic oligonucleotide
  source 1..21: mol_type = other DNA
ggtgatactcgtctgaatgcg

SEQ ID NO: 44102 - DNA, 21 bp, synthetic construct
  misc_feature 1..21: note = Description of Artificial Sequence: Synthetic oligonucleotide
  source 1..21: mol_type = other DNA
acccaaagaagccaagccgcc

SEQ ID NO: 44103 - DNA, 21 bp, synthetic construct
  misc_feature 1..21: note = Description of Artificial Sequence: Synthetic oligonucleotide
  source 1..21: mol_type = other DNA
gagattagtcgtcctgcttcg

SEQ ID NO: 44104 - DNA, 21 bp, synthetic construct
  misc_feature 1..21: note = Description of Artificial Sequence: Synthetic oligonucleotide
  source 1..21: mol_type = other DNA
cgttctaatggttcggcggct

SEQ ID NO: 44105 - DNA, 21 bp, synthetic construct
  misc_feature 1..21: note = Description of Artificial Sequence: Synthetic oligonucleotide
  source 1..21: mol_type = other DNA
tctgatcgtaatatgtctcgt

SEQ ID NO: 44106 - DNA, 21 bp, synthetic construct
  misc_feature 1..21: note = Description of Artificial Sequence: Synthetic oligonucleotide
  source 1..21: mol_type = other DNA
tacagacacgaaagactcagc

SEQ ID NO: 44107 - DNA, 21 bp, synthetic construct
  misc_feature 1..21: note = Description of Artificial Sequence: Synthetic oligonucleotide
  source 1..21: mol_type = other DNA
agccaacaaaccaccgaagcc

SEQ ID NO: 44108 - DNA, 21 bp, synthetic construct
  misc_feature 1..21: note = Description of Artificial Sequence: Synthetic oligonucleotide
  source 1..21: mol_type = other DNA
cggtcgggtaatggttctttg

SEQ ID NO: 44109 - DNA, 21 bp, synthetic construct
  misc_feature 1..21: note = Description of Artificial Sequence: Synthetic oligonucleotide
  source 1..21: mol_type = other DNA
ttcagcaccatcaaaggcgtc

SEQ ID NO: 44110 - DNA, 21 bp, synthetic construct
  misc_feature 1..21: note = Description of Artificial Sequence: Synthetic oligonucleotide
  source 1..21: mol_type = other DNA
gttggtagtagtattaagacg

SEQ ID NO: 44111 - DNA, 21 bp, synthetic construct
  misc_feature 1..21: note = Description of Artificial Sequence: Synthetic oligonucleotide
  source 1..21: mol_type = other DNA
ccgtcgggtcctgttaggggg

SEQ ID NO: 44112 - DNA, 21 bp, synthetic construct
  misc_feature 1..21: note = Description of Artificial Sequence: Synthetic oligonucleotide
  source 1..21: mol_type = other DNA
gccagagaccccggcggcgtc

SEQ ID NO: 44113 - DNA, 21 bp, synthetic construct
  misc_feature 1..21: note = Description of Artificial Sequence: Synthetic oligonucleotide
  source 1..21: mol_type = other DNA
caagtcaccggcgccagccac

SEQ ID NO: 44114 - DNA, 21 bp, synthetic construct
  misc_feature 1..21: note = Description of Artificial Sequence: Synthetic oligonucleotide
  source 1..21: mol_type = other DNA
ctcagaaacggcatcgccagc

SEQ ID NO: 44115 - DNA, 21 bp, synthetic construct
  misc_feature 1..21: note = Description of Artificial Sequence: Synthetic oligonucleotide
  source 1..21: mol_type = other DNA
actggttctagttcttcgcag

SEQ ID NO: 44116 - DNA, 21 bp, synthetic construct
  misc_feature 1..21: note = Description of Artificial Sequence: Synthetic oligonucleotide
  source 1..21: mol_type = other DNA
agcaccagcagagacgccacc

SEQ ID NO: 44117 - DNA, 21 bp, synthetic construct
  misc_feature 1..21: note = Description of Artificial Sequence: Synthetic oligonucleotide
  source 1..21: mol_type = other DNA
aacaccctccaaggccacaga

SEQ ID NO: 44118 - DNA, 21 bp, synthetic construct
  misc_feature 1..21: note = Description of Artificial Sequence: Synthetic oligonucleotide
  source 1..21: mol_type = other DNA
atgtcgggtgttactgcgagg

SEQ ID NO: 44119 - DNA, 21 bp, synthetic construct
  misc_feature 1..21: note = Description of Artificial Sequence: Synthetic oligonucleotide
  source 1..21: mol_type = other DNA
ccgcatactaataatcctgat

SEQ ID NO: 44120 - DNA, 21 bp, synthetic construct
  misc_feature 1..21: note = Description of Artificial Sequence: Synthetic oligonucleotide
  source 1..21: mol_type = other DNA
caccaacccgaaaaaatcgcc

SEQ ID NO: 44121 - DNA, 21 bp, synthetic construct
  misc_feature 1..21: note = Description of Artificial Sequence: Synthetic oligonucleotide
  source 1..21: mol_type = other DNA
ggggcttcgactcctaggctt

SEQ ID NO: 44122 - DNA, 21 bp, synthetic construct
  misc_feature 1..21: note = Description of Artificial Sequence: Synthetic oligonucleotide
  source 1..21: mol_type = other DNA
cccaccatgcaaggcgtccac

SEQ ID NO: 44123 - DNA, 21 bp, synthetic construct
  misc_feature 1..21: note = Description of Artificial Sequence: Synthetic oligonucleotide
  source 1..21: mol_type = other DNA
agcaccatgaccaccagaaga

SEQ ID NO: 44124 - DNA, 21 bp, synthetic construct
  misc_feature 1..21: note = Description of Artificial Sequence: Synthetic oligonucleotide
  source 1..21: mol_type = other DNA
gattcgactcttggtcagtct

SEQ ID NO: 44125 - DNA, 21 bp, synthetic construct
  misc_feature 1..21: note = Description of Artificial Sequence: Synthetic oligonucleotide
  source 1..21: mol_type = other DNA
gtcgccaccagaggcgaccac

SEQ ID NO: 44126 - DNA, 21 bp, synthetic construct
  misc_feature 1..21: note = Description of Artificial Sequence: Synthetic oligonucleotide
  source 1..21: mol_type = other DNA
tgtcttactgatgctcgggct

SEQ ID NO: 44127 - DNA, 21 bp, synthetic construct
  misc_feature 1..21: note = Description of Artificial Sequence: Synthetic oligonucleotide
  source 1..21: mol_type = other DNA
tctactaatggtaatggtttg

SEQ ID NO: 44128 - DNA, 21 bp, synthetic construct
  misc_feature 1..21: note = Description of Artificial Sequence: Synthetic oligonucleotide
  source 1..21: mol_type = other DNA
tataatcatggtagtgtggat

SEQ ID NO: 44129 - DNA, 21 bp, synthetic construct
  misc_feature 1..21: note = Description of Artificial Sequence: Synthetic oligonucleotide
  source 1..21: mol_type = other DNA
cacgacagcagcgccagaacc

SEQ ID NO: 44130 - DNA, 21 bp, synthetic construct
  misc_feature 1..21: note = Description of Artificial Sequence: Synthetic oligonucleotide
  source 1..21: mol_type = other DNA
gtcagcgacagcaacaccaaa

SEQ ID NO: 44131 - DNA, 21 bp, synthetic construct
  misc_feature 1..21: note = Description of Artificial Sequence: Synthetic oligonucleotide
  source 1..21: mol_type = other DNA
cacaccaccggcatcatcggc

SEQ ID NO: 44132 - DNA, 21 bp, synthetic construct
  misc_feature 1..21: note = Description of Artificial Sequence: Synthetic oligonucleotide
  source 1..21: mol_type = other DNA
gcgtcgtctttgttgaatgtg

SEQ ID NO: 44133 - DNA, 21 bp, synthetic construct
  misc_feature 1..21: note = Description of Artificial Sequence: Synthetic oligonucleotide
  source 1..21: mol_type = other DNA
ccctacgcccccagaaaagac

SEQ ID NO: 44134 - DNA, 21 bp, synthetic construct
  misc_feature 1..21: note = Description of Artificial Sequence: Synthetic oligonucleotide
  source 1..21: mol_type = other DNA
tcggtgacgggtggtcggggt

SEQ ID NO: 44135 - DNA, 21 bp, synthetic construct
  misc_feature 1..21: note = Description of Artificial Sequence: Synthetic oligonucleotide
  source 1..21: mol_type = other DNA
actttgccgacgtcgattagg

SEQ ID NO: 44136 - DNA, 21 bp, synthetic construct
  misc_feature 1..21: note = Description of Artificial Sequence: Synthetic oligonucleotide
  source 1..21: mol_type = other DNA
ggcagacacggcgcccccacc

SEQ ID NO: 44137 - DNA, 21 bp, synthetic construct
  misc_feature 1..21: note = Description of Artificial Sequence: Synthetic oligonucleotide
  source 1..21: mol_type = other DNA
aagtctactcatgggatgact

SEQ ID NO: 44138 - DNA, 21 bp, synthetic construct
  misc_feature 1..21: note = Description of Artificial Sequence: Synthetic oligonucleotide
  source 1..21: mol_type = other DNA
aacctccacgccacccccctc

SEQ ID NO: 44139 - DNA, 21 bp, synthetic construct
  misc_feature 1..21: note = Description of Artificial Sequence: Synthetic oligonucleotide
  source 1..21: mol_type = other DNA
gtgtctgggcagacgtctggt

SEQ ID NO: 44140 - DNA, 21 bp, synthetic construct
  misc_feature 1..21: note = Description of Artificial Sequence: Synthetic oligonucleotide
  source 1..21: mol_type = other DNA
cccggcagagaaaaaaccgtc

SEQ ID NO: 44141 - DNA, 21 bp, synthetic construct
  misc_feature 1..21: note = Description of Artificial Sequence: Synthetic oligonucleotide
  source 1..21: mol_type = other DNA
ccgacgagtagtccgcagagg

SEQ ID NO: 44142 - DNA, 21 bp, synthetic construct
  misc_feature 1..21: note = Description of Artificial Sequence: Synthetic oligonucleotide
  source 1..21: mol_type = other DNA
accaccatgagcaaagtcggc

SEQ ID NO: 44143 - DNA, 21 bp, synthetic construct
  misc_feature 1..21: note = Description of Artificial Sequence: Synthetic oligonucleotide
  source 1..21: mol_type = other DNA
acttataatagtagtcaggcg

SEQ ID NO: 44144 - DNA, 21 bp, synthetic construct
  misc_feature 1..21: note = Description of Artificial Sequence: Synthetic oligonucleotide
  source 1..21: mol_type = other DNA
cttaatgttggttctgtgagg

SEQ ID NO: 44145 - DNA, 21 bp, synthetic construct
  misc_feature 1..21: note = Description of Artificial Sequence: Synthetic oligonucleotide
  source 1..21: mol_type = other DNA
agagacgccaccagcatcggc

SEQ ID NO: 44146 - DNA, 21 bp, synthetic construct
  misc_feature 1..21: note = Description of Artificial Sequence: Synthetic oligonucleotide
  source 1..21: mol_type = other DNA
gtcagcaccggcagcttcacc

SEQ ID NO: 44147 - DNA, 21 bp, synthetic construct
  misc_feature 1..21: note = Description of Artificial Sequence: Synthetic oligonucleotide
  source 1..21: mol_type = other DNA
cggtttgattctgttaaggat

SEQ ID NO: 44148 - DNA, 21 bp, synthetic construct
  misc_feature 1..21: note = Description of Artificial Sequence: Synthetic oligonucleotide
  source 1..21: mol_type = other DNA
ctcctcggcgacaccaaaccc

SEQ ID NO: 44149 - DNA, 21 bp, synthetic construct
  misc_feature 1..21: note = Description of Artificial Sequence: Synthetic oligonucleotide
  source 1..21: mol_type = other DNA
ggttctaagaatgcggattat

SEQ ID NO: 44150 - DNA, 21 bp, synthetic construct
  misc_feature 1..21: note = Description of Artificial Sequence: Synthetic oligonucleotide
  source 1..21: mol_type = other DNA
aataatgggaggcctattgcg

SEQ ID NO: 44151 - DNA, 21 bp, synthetic construct
  misc_feature 1..21: note = Description of Artificial Sequence: Synthetic oligonucleotide
  source 1..21: mol_type = other DNA
gaagtccccaaacccggcaga

SEQ ID NO: 44152 - DNA, 21 bp, synthetic construct
  misc_feature 1..21: note = Description of Artificial Sequence: Synthetic oligonucleotide
  source 1..21: mol_type = other DNA
aacacccacaacatccaaggc

SEQ ID NO: 44153 - DNA, 21 bp, synthetic construct
  misc_feature 1..21: note = Description of Artificial Sequence: Synthetic oligonucleotide
  source 1..21: mol_type = other DNA
tctggtcgtgataagtttagt

SEQ ID NO: 44154 - DNA, 21 bp, synthetic construct
  misc_feature 1..21: note = Description of Artificial Sequence: Synthetic oligonucleotide
  source 1..21: mol_type = other DNA
cccagaaccgacagaaacacc

SEQ ID NO: 44155 - DNA, 21 bp, synthetic construct
  misc_feature 1..21: note = Description of Artificial Sequence: Synthetic oligonucleotide
  source 1..21: mol_type = other DNA
gttagtagtcctcgtatgagt

SEQ ID NO: 44156 - DNA, 21 bp, synthetic construct
  misc_feature 1..21: note = Description of Artificial Sequence: Synthetic oligonucleotide
  source 1..21: mol_type = other DNA
caaacccacgcccccaccagc

SEQ ID NO: 44157 - DNA, 21 bp, synthetic construct
  misc_feature 1..21: note = Description of Artificial Sequence: Synthetic oligonucleotide
  source 1..21: mol_type = other DNA
tctgattctcgtaatacgaat

SEQ ID NO: 44158 - DNA, 21 bp, synthetic construct
  misc_feature 1..21: note = Description of Artificial Sequence: Synthetic oligonucleotide
  source 1..21: mol_type = other DNA
agacaaaccacccccctcggc

SEQ ID NO: 44159 - DNA, 21 bp, synthetic construct
  misc_feature 1..21: note = Description of Artificial Sequence: Synthetic oligonucleotide
  source 1..21: mol_type = other DNA
gaagccaccagcagcaccaaa

SEQ ID NO: 44160 - DNA, 21 bp, synthetic construct
  misc_feature 1..21: note = Description of Artificial Sequence: Synthetic oligonucleotide
  source 1..21: mol_type = other DNA
ggttctcggaattcgagtgcg

SEQ ID NO: 44161 - DNA, 21 bp, synthetic construct
  misc_feature 1..21: note = Description of Artificial Sequence: Synthetic oligonucleotide
  source 1..21: mol_type = other DNA
cttaatattgctaatagtaag

SEQ ID NO: 44162 - DNA, 21 bp, synthetic construct
  misc_feature 1..21: note = Description of Artificial Sequence: Synthetic oligonucleotide
  source 1..21: mol_type = other DNA
ctcatgagcaacaaccaaccc

SEQ ID NO: 44163 - DNA, 21 bp, synthetic construct
  misc_feature 1..21: note = Description of Artificial Sequence: Synthetic oligonucleotide
  source 1..21: mol_type = other DNA
catcttgctatgaatcgtaat

SEQ ID NO: 44164 - DNA, 21 bp, synthetic construct
  misc_feature 1..21: note = Description of Artificial Sequence: Synthetic oligonucleotide
  source 1..21: mol_type = other DNA
agcgtcagcagccccagagac

SEQ ID NO: 44165 - DNA, 21 bp, synthetic construct
  misc_feature 1..21: note = Description of Artificial Sequence: Synthetic oligonucleotide
  source 1..21: mol_type = other DNA
attatggataagcatcttaat

SEQ ID NO: 44166 - DNA, 21 bp, synthetic construct
  misc_feature 1..21: note = Description of Artificial Sequence: Synthetic oligonucleotide
  source 1..21: mol_type = other DNA
agggggctggattctattaat

SEQ ID NO: 44167 - DNA, 21 bp, synthetic construct
  misc_feature 1..21: note = Description of Artificial Sequence: Synthetic oligonucleotide
  source 1..21: mol_type = other DNA
ggggctaagccgggtttggct

SEQ ID NO: 44168 - DNA, 21 bp, synthetic construct
  misc_feature 1..21: note = Description of Artificial Sequence: Synthetic oligonucleotide
  source 1..21: mol_type = other DNA
gttaggtctagggagagtcct

SEQ ID NO: 44169 - DNA, 21 bp, synthetic construct
  misc_feature 1..21: note = Description of Artificial Sequence: Synthetic oligonucleotide
  source 1..21: mol_type = other DNA
actgttaatacgcggtctgcg

SEQ ID NO: 44170 - DNA, 21 bp, synthetic construct
  misc_feature 1..21: note = Description of Artificial Sequence: Synthetic oligonucleotide
  source 1..21: mol_type = other DNA
ggtacgcctaataatcgttct

SEQ ID NO: 44171 - DNA, 21 bp, synthetic construct
  misc_feature 1..21: note = Description of Artificial Sequence: Synthetic oligonucleotide
  source 1..21: mol_type = other DNA
gaggggcttaatactagtcgt

SEQ ID NO: 44172 - DNA, 21 bp, synthetic construct
  misc_feature 1..21: note = Description of Artificial Sequence: Synthetic oligonucleotide
  source 1..21: mol_type = other DNA
ccggggctttctaattcgcgt

SEQ ID NO: 44173 - DNA, 21 bp, synthetic construct
  misc_feature 1..21: note = Description of Artificial Sequence: Synthetic oligonucleotide
  source 1..21: mol_type = other DNA
gtcggcaacaacaacagactc

SEQ ID NO: 44174 - DNA, 21 bp, synthetic construct
  misc_feature 1..21: note = Description of Artificial Sequence: Synthetic oligonucleotide
  source 1..21: mol_type = other DNA
cccatggaagtcagaagcgac

SEQ ID NO: 44175 - DNA, 21 bp, synthetic construct
  misc_feature 1..21: note = Description of Artificial Sequence: Synthetic oligonucleotide
  source 1..21: mol_type = other DNA
ctccccatcaccgccagaaac

SEQ ID NO: 44176 - DNA, 21 bp, synthetic construct
  misc_feature 1..21: note = Description of Artificial Sequence: Synthetic oligonucleotide
  source 1..21: mol_type = other DNA
gctcagcggtcgactatggtg

SEQ ID NO: 44177 - DNA, 21 bp, synthetic construct
  misc_feature 1..21: note = Description of Artificial Sequence: Synthetic oligonucleotide
  source 1..21: mol_type = other DNA
ggtaattctatggctgggact

SEQ ID NO: 44178 - DNA, 21 bp, synthetic construct
  misc_feature 1..21: note = Description of Artificial Sequence: Synthetic oligonucleotide
  source 1..21: mol_type = other DNA
ccgttgcctaagaatagtagt

SEQ ID NO: 44179 - DNA, 21 bp, synthetic construct
  misc_feature 1..21: note = Description of Artificial Sequence: Synthetic oligonucleotide
  source 1..21: mol_type = other DNA
tcgggttctagtaagccgact

SEQ ID NO: 44180 - DNA, 21 bp, synthetic construct
  misc_feature 1..21: note = Description of Artificial Sequence: Synthetic oligonucleotide
  source 1..21: mol_type = other DNA
atcaacttcagcggcaccaga

SEQ ID NO: 44181 - DNA, 21 bp, synthetic construct
  misc_feature 1..21: note = Description of Artificial Sequence: Synthetic oligonucleotide
  source 1..21: mol_type = other DNA
agccccatgggcgtcaccaga

SEQ ID NO: 44182 - DNA, 21 bp, synthetic construct
  misc_feature 1..21: note = Description of Artificial Sequence: Synthetic oligonucleotide
  source 1..21: mol_type = other DNA
atgtaccaaaaacccgccagc

SEQ ID NO: 44183 - DNA, 21 bp, synthetic construct
  misc_feature 1..21: note = Description of Artificial Sequence: Synthetic oligonucleotide
  source 1..21: mol_type = other DNA
gggacttttagtactcagagt

SEQ ID NO: 44184 - DNA, 21 bp, synthetic construct
  misc_feature 1..21: note = Description of Artificial Sequence: Synthetic oligonucleotide
  source 1..21: mol_type = other DNA
gccaacaccagcggccaagcc

SEQ ID NO: 44185 - DNA, 21 bp, synthetic construct
  misc_feature 1..21: note = Description of Artificial Sequence: Synthetic oligonucleotide
  source 1..21: mol_type = other DNA
ttcggcagcagaaacgaaggc

SEQ ID NO: 44186 - DNA, 21 bp, synthetic construct
  misc_feature 1..21: note = Description of Artificial Sequence: Synthetic oligonucleotide
  source 1..21: mol_type = other DNA
cctggtgatagtggtaaggtt

SEQ ID NO: 44187 - DNA, 21 bp, synthetic construct
  misc_feature 1..21: note = Description of Artificial Sequence: Synthetic oligonucleotide
  source 1..21: mol_type = other DNA
aatgcttcgacggctaatatg

SEQ ID NO: 44188 - DNA, 21 bp, synthetic construct
  misc_feature 1..21: note = Description of Artificial Sequence: Synthetic oligonucleotide
  source 1..21: mol_type = other DNA
aatagtcgtgagtcgcagggg

SEQ ID NO: 44189 - DNA, 21 bp, synthetic construct
  misc_feature 1..21: note = Description of Artificial Sequence: Synthetic oligonucleotide
  source 1..21: mol_type = other DNA
tcgggtgcggggtcggctggg

SEQ ID NO: 44190 - DNA, 21 bp, synthetic construct
  misc_feature 1..21: note = Description of Artificial Sequence: Synthetic oligonucleotide
  source 1..21: mol_type = other DNA
gctactgggaatgggcggggg

SEQ ID NO: 44191 - DNA, 21 bp, synthetic construct
  misc_feature 1..21: note = Description of Artificial Sequence: Synthetic oligonucleotide
  source 1..21: mol_type = other DNA
ctcaccgccaaaagcagccaa

SEQ ID NO: 44192 - DNA, 21 bp, synthetic construct
  misc_feature 1..21: note = Description of Artificial Sequence: Synthetic oligonucleotide
  source 1..21: mol_type = other DNA
tcgagttatacgggtcagagg

SEQ ID NO: 44193 - DNA, 21 bp, synthetic construct
  misc_feature 1..21: note = Description of Artificial Sequence: Synthetic oligonucleotide
  source 1..21: mol_type = other DNA
cagtctcttacgcggactcat

SEQ ID NO: 44194 - DNA, 21 bp, synthetic construct
  misc_feature 1..21: note = Description of Artificial Sequence: Synthetic oligonucleotide
  source 1..21: mol_type = other DNA
aattcggcgagtctgaatcat

SEQ ID NO: 44195 - DNA, 21 bp, synthetic construct
  misc_feature 1..21: note = Description of Artificial Sequence: Synthetic oligonucleotide
  source 1..21: mol_type = other DNA
ttgaatcagcattcgagtctt

SEQ ID NO: 44196 - DNA, 21 bp, synthetic construct
  misc_feature 1..21: note = Description of Artificial Sequence: Synthetic oligonucleotide
  source 1..21: mol_type = other DNA
cctactttggggggtccgatg

SEQ ID NO: 44197 - DNA, 21 bp, synthetic construct
  misc_feature 1..21: note = Description of Artificial Sequence: Synthetic oligonucleotide
  source 1..21: mol_type = other DNA
cctaatgttggtgttgttagg

SEQ ID NO: 44198 - DNA, 21 bp, synthetic construct
  misc_feature 1..21: note = Description of Artificial Sequence: Synthetic oligonucleotide
  source 1..21: mol_type = other DNA
tcttctgctccgagtctttct

SEQ ID NO: 44199 - DNA, 21 bp, synthetic construct
  misc_feature 1..21: note = Description of Artificial Sequence: Synthetic oligonucleotide
  source 1..21: mol_type = other DNA
cccctcagcaaaagcgccctc

SEQ ID NO: 44200 - DNA, 21 bp, synthetic construct
  misc_feature 1..21: note = Description of Artificial Sequence: Synthetic oligonucleotide
  source 1..21: mol_type = other DNA
tacgccaccgacggcctcaaa

SEQ ID NO: 44201 - DNA, 21 bp, synthetic construct
  misc_feature 1..21: note = Description of Artificial Sequence: Synthetic oligonucleotide
  source 1..21: mol_type = other DNA
gacatcagcagaagccacggc

SEQ ID NO: 44202 - DNA, 21 bp, synthetic construct
  misc_feature 1..21: note = Description of Artificial Sequence: Synthetic oligonucleotide
  source 1..21: mol_type = other DNA
ggcaccgccagaaccaccggc

SEQ ID NO: 44203 - DNA, 21 bp, synthetic construct
  misc_feature 1..21: note = Description of Artificial Sequence: Synthetic oligonucleotide
  source 1..21: mol_type = other DNA
tgcagacacacccccggcaac

SEQ ID NO: 44204 - DNA, 21 bp, synthetic construct
  misc_feature 1..21: note = Description of Artificial Sequence: Synthetic oligonucleotide
  source 1..21: mol_type = other DNA
tgcccccaaagcagagaaaaa

SEQ ID NO: 44205 - DNA, 21 bp, synthetic construct
  misc_feature 1..21: note = Description of Artificial Sequence: Synthetic oligonucleotide
  source 1..21: mol_type = other DNA
catactactggtattattggg

SEQ ID NO: 44206 - DNA, 21 bp, synthetic construct
  misc_feature 1..21: note = Description of Artificial Sequence: Synthetic oligonucleotide
  source 1..21: mol_type = other DNA
gggctggttcctaatttgatt

SEQ ID NO: 44207 - DNA, 21 bp, synthetic construct
  misc_feature 1..21: note = Description of Artificial Sequence: Synthetic oligonucleotide
  source 1..21: mol_type = other DNA
ttcaccgccagcggcggcaac

SEQ ID NO: 44208 - DNA, 21 bp, synthetic construct
  misc_feature 1..21: note = Description of Artificial Sequence: Synthetic oligonucleotide
  source 1..21: mol_type = other DNA
tctattaagtctgttactaat

SEQ ID NO: 44209 - DNA, 21 bp, synthetic construct
  misc_feature 1..21: note = Description of Artificial Sequence: Synthetic oligonucleotide
  source 1..21: mol_type = other DNA
agctacagcagcagccaactc

SEQ ID NO: 44210 - DNA, 21 bp, synthetic construct
  misc_feature 1..21: note = Description of Artificial Sequence: Synthetic oligonucleotide
  source 1..21: mol_type = other DNA
ttgagttcggataagaatgtt

SEQ ID NO: 44211 - DNA, 21 bp, synthetic construct
  misc_feature 1..21: note = Description of Artificial Sequence: Synthetic oligonucleotide
  source 1..21: mol_type = other DNA
gataggtataatcgtcagctt

SEQ ID NO: 44212 - DNA, 21 bp, synthetic construct
  misc_feature 1..21: note = Description of Artificial Sequence: Synthetic oligonucleotide
  source 1..21: mol_type = other DNA
agcagcgaccaacccagactc

SEQ ID NO: 44213 - DNA, 21 bp, synthetic construct
  misc_feature 1..21: note = Description of Artificial Sequence: Synthetic oligonucleotide
  source 1..21: mol_type = other DNA
cattataatcagactggtttg

SEQ ID NO: 44214 - DNA, 21 bp, synthetic construct
  misc_feature 1..21: note = Description of Artificial Sequence: Synthetic oligonucleotide
  source 1..21: mol_type = other DNA
ggtgggactaataatcttaat

SEQ ID NO: 44215 - DNA, 21 bp, synthetic construct
  misc_feature 1..21: note = Description of Artificial Sequence: Synthetic oligonucleotide
  source 1..21: mol_type = other DNA
caagtccccgtcagacccgtc

SEQ ID NO: 44216 - DNA, 21 bp, synthetic construct
  misc_feature 1..21: note = Description of Artificial Sequence: Synthetic oligonucleotide
  source 1..21: mol_type = other DNA
atccaaacccacaccagcaac

SEQ ID NO: 44217 - DNA, 21 bp, synthetic construct
  misc_feature 1..21: note = Description of Artificial Sequence: Synthetic oligonucleotide
  source 1..21: mol_type = other DNA
caatacaaccaagccggcctc

SEQ ID NO: 44218 - DNA, 21 bp, synthetic construct
  misc_feature 1..21: note = Description of Artificial Sequence: Synthetic oligonucleotide
  source 1..21: mol_type = other DNA
tatgagaagaatagtctgatg

SEQ ID NO: 44219 - DNA, 21 bp, synthetic construct
  misc_feature 1..21: note = Description of Artificial Sequence: Synthetic oligonucleotide
  source 1..21: mol_type = other DNA
aacgacgtcaaacaaggccac

SEQ ID NO: 44220 - DNA, 21 bp, synthetic construct
  misc_feature 1..21: note = Description of Artificial Sequence: Synthetic oligonucleotide
  source 1..21: mol_type = other DNA
aattctattactcggagtagt

SEQ ID NO: 44221 - DNA, 21 bp, synthetic construct
  misc_feature 1..21: note = Description of Artificial Sequence: Synthetic oligonucleotide
  source 1..21: mol_type = other DNA
ccccaacacagcgtctacagc

SEQ ID NO: 44222 - DNA, 21 bp, synthetic construct
  misc_feature 1..21: note = Description of Artificial Sequence: Synthetic oligonucleotide
  source 1..21: mol_type = other DNA
gataagactgagtcgttgggg

SEQ ID NO: 44223 - DNA, 21 bp, synthetic construct
  misc_feature 1..21: note = Description of Artificial Sequence: Synthetic oligonucleotide
  source 1..21: mol_type = other DNA
tctacttcgggtacgagtagt

SEQ ID NO: 44224 - DNA, 21 bp, synthetic construct
  misc_feature 1..21: note = Description of Artificial Sequence: Synthetic oligonucleotide
  source 1..21: mol_type = other DNA
attacggcgacggcggagagt

SEQ ID NO: 44225 - DNA, 21 bp, synthetic construct
  misc_feature 1..21: note = Description of Artificial Sequence: Synthetic oligonucleotide
  source 1..21: mol_type = other DNA
atgagttctgagcgtccgggt

SEQ ID NO: 44226 - DNA, 21 bp, synthetic construct
  misc_feature 1..21: note = Description of Artificial Sequence: Synthetic oligonucleotide
  source 1..21: mol_type = other DNA
catcagctggaggctcataag

SEQ ID NO: 44227 - DNA, 21 bp, synthetic construct
  misc_feature 1..21: note = Description of Artificial Sequence: Synthetic oligonucleotide
  source 1..21: mol_type = other DNA
actacgcattcgtctattaat

SEQ ID NO: 44228 - DNA, 21 bp, synthetic construct
  misc_feature 1..21: note = Description of Artificial Sequence: Synthetic oligonucleotide
  source 1..21: mol_type = other DNA
tatcgggttggttcgatttct

SEQ ID NO: 44229 - DNA, 21 bp, synthetic construct
  misc_feature 1..21: note = Description of Artificial Sequence: Synthetic oligonucleotide
  source 1..21: mol_type = other DNA
cggtttgattctgttaaggat

SEQ ID NO: 44230 - DNA, 21 bp, synthetic construct
  misc_feature 1..21: note = Description of Artificial Sequence: Synthetic oligonucleotide
  source 1..21: mol_type = other DNA
ttggggtctagtactattttg

SEQ ID NO: 44231 - DNA, 21 bp, synthetic construct
  misc_feature 1..21: note = Description of Artificial Sequence: Synthetic oligonucleotide
  source 1..21: mol_type = other DNA
cgtctttctaatgcttatgct

SEQ ID NO: 44232 - DNA, 21 bp, synthetic construct
  misc_feature 1..21: note = Description of Artificial Sequence: Synthetic oligonucleotide
  source 1..21: mol_type = other DNA
gccagcctcaaaacccaaatg

SEQ ID NO: 44233 - DNA, 21 bp, synthetic construct
  misc_feature 1..21: note = Description of Artificial Sequence: Synthetic oligonucleotide
  source 1..21: mol_type = other DNA
gcgggtggtattaataagctt

SEQ ID NO: 44234 - DNA, 21 bp, synthetic construct
  misc_feature 1..21: note = Description of Artificial Sequence: Synthetic oligonucleotide
  source 1..21: mol_type = other DNA
aatacttatcagtctaagaat

SEQ ID NO: 44235 - DNA, 21 bp, synthetic construct
  misc_feature 1..21: note = Description of Artificial Sequence: Synthetic oligonucleotide
  source 1..21: mol_type = other DNA
agtactatgaagagtgcggcg

SEQ ID NO: 44236 - DNA, 21 bp, synthetic construct
  misc_feature 1..21: note = Description of Artificial Sequence: Synthetic oligonucleotide
  source 1..21: mol_type = other DNA
agagacctcggccacgacaac

SEQ ID NO: 44237 - DNA, 21 bp, synthetic construct
  misc_feature 1..21: note = Description of Artificial Sequence: Synthetic oligonucleotide
  source 1..21: mol_type = other DNA
atgacggcttctttggggatg

SEQ ID NO: 44238 - DNA, 21 bp, synthetic construct
  misc_feature 1..21: note = Description of Artificial Sequence: Synthetic oligonucleotide
  source 1..21: mol_type = other DNA
cgtcagattggtaagcaggtg

SEQ ID NO: 44239 - DNA, 21 bp, synthetic construct
  misc_feature 1..21: note = Description of Artificial Sequence: Synthetic oligonucleotide
  source 1..21: mol_type = other DNA
gtcctcgccaccaaagactgc

SEQ ID NO: 44240 - DNA, 21 bp, synthetic construct
  misc_feature 1..21: note = Description of Artificial Sequence: Synthetic oligonucleotide
  source 1..21: mol_type = other DNA
ggtgttaataataatattaat

SEQ ID NO: 44241 - DNA, 21 bp, synthetic construct
  misc_feature 1..21: note = Description of Artificial Sequence: Synthetic oligonucleotide
  source 1..21: mol_type = other DNA
aagacgggggatcagatgggg

SEQ ID NO: 44242 - DNA, 21 bp, synthetic construct
  misc_feature 1..21: note = Description of Artificial Sequence: Synthetic oligonucleotide
  source 1..21: mol_type = other DNA
gtttcgggtatgagtgggagt

SEQ ID NO: 44243 - DNA, 21 bp, synthetic construct
  misc_feature 1..21: note = Description of Artificial Sequence: Synthetic oligonucleotide
  source 1..21: mol_type = other DNA
ccggattctactttttcgagt

SEQ ID NO: 44244 - DNA, 21 bp, synthetic construct
  misc_feature 1..21: note = Description of Artificial Sequence: Synthetic oligonucleotide
  source 1..21: mol_type = other DNA
ctcatcctccccggcaacaac

SEQ ID NO: 44245 - DNA, 21 bp, synthetic construct
  misc_feature 1..21: note = Description of Artificial Sequence: Synthetic oligonucleotide
  source 1..21: mol_type = other DNA
ggttctaatattaataatggt

SEQ ID NO: 44246 - DNA, 21 bp, synthetic construct
  misc_feature 1..21: note = Description of Artificial Sequence: Synthetic oligonucleotide
  source 1..21: mol_type = other DNA
aagaatggttctgtggctctt

SEQ ID NO: 44247 - DNA, 21 bp, synthetic construct
  misc_feature 1..21: note = Description of Artificial Sequence: Synthetic oligonucleotide
  source 1..21: mol_type = other DNA
aagtttcctccgaattctggg

SEQ ID NO: 44248 - DNA, 21 bp, synthetic construct
  misc_feature 1..21: note = Description of Artificial Sequence: Synthetic oligonucleotide
  source 1..21: mol_type = other DNA
attaatactgggagtgttaag

SEQ ID NO: 44249 - DNA, 21 bp, synthetic construct
  misc_feature 1..21: note = Description of Artificial Sequence: Synthetic oligonucleotide
  source 1..21: mol_type = other DNA
gagaataacgcgctttcgagg

SEQ ID NO: 44250 - DNA, 21 bp, synthetic construct
  misc_feature 1..21: note = Description of Artificial Sequence: Synthetic oligonucleotide
  source 1..21: mol_type = other DNA
agccccagagacagaaccagc

SEQ ID NO: 44251 - DNA, 21 bp, synthetic construct
  misc_feature 1..21: note = Description of Artificial Sequence: Synthetic oligonucleotide
  source 1..21: mol_type = other DNA
cacagcgaaaacggcaacaga

SEQ ID NO: 44252 - DNA, 21 bp, synthetic construct
  misc_feature 1..21: note = Description of Artificial Sequence: Synthetic oligonucleotide
  source 1..21: mol_type = other DNA
tacagaagcaaagaaatcggc

SEQ ID NO: 44253 - DNA, 21 bp, synthetic construct
  misc_feature 1..21: note = Description of Artificial Sequence: Synthetic oligonucleotide
  source 1..21: mol_type = other DNA
ggcagcgccggcaacatgctc

SEQ ID NO: 44254 - DNA, 21 bp, synthetic construct
  misc_feature 1..21: note = Description of Artificial Sequence: Synthetic oligonucleotide
  source 1..21: mol_type = other DNA
aatattgctcagaaggagttg

SEQ ID NO: 44255 - DNA, 21 bp, synthetic construct
  misc_feature 1..21: note = Description of Artificial Sequence: Synthetic oligonucleotide
  source 1..21: mol_type = other DNA
ccccaaaacaaccaagcccac

SEQ ID NO: 44256 - DNA, 21 bp, synthetic construct
  misc_feature 1..21: note = Description of Artificial Sequence: Synthetic oligonucleotide
  source 1..21: mol_type = other DNA
ctgtcgaatcagaataatcag

SEQ ID NO: 44257 - DNA, 21 bp, synthetic construct
  misc_feature 1..21: note = Description of Artificial Sequence: Synthetic oligonucleotide
  source 1..21: mol_type = other DNA
gagagtaattcgagtcggggg

SEQ ID NO: 44258 - DNA, 21 bp, synthetic construct
  misc_feature 1..21: note = Description of Artificial Sequence: Synthetic oligonucleotide
  source 1..21: mol_type = other DNA
aacagcagcggccaaaacccc

SEQ ID NO: 44259 - DNA, 21 bp, synthetic construct
  misc_feature 1..21: note = Description of Artificial Sequence: Synthetic oligonucleotide
  source 1..21: mol_type = other DNA
tctaatgtggctaagcgtact

SEQ ID NO: 44260 - DNA, 21 bp, synthetic construct
  misc_feature 1..21: note = Description of Artificial Sequence: Synthetic oligonucleotide
  source 1..21: mol_type = other DNA
gttagtaagagtccgtctact

SEQ ID NO: 44261 - DNA, 21 bp, synthetic construct
  misc_feature 1..21: note = Description of Artificial Sequence: Synthetic oligonucleotide
  source 1..21: mol_type = other DNA
agcagagaaaaaaacaacgcc

SEQ ID NO: 44262 - DNA, 21 bp, synthetic construct
  misc_feature 1..21: note = Description of Artificial Sequence: Synthetic oligonucleotide
  source 1..21: mol_type = other DNA
ggggttagtaatctggcttcg

SEQ ID NO: 44263 - DNA, 21 bp, synthetic construct
  misc_feature 1..21: note = Description of Artificial Sequence: Synthetic oligonucleotide
  source 1..21: mol_type = other DNA
gagcggaatgggaattttacg

SEQ ID NO: 44264 - DNA, 21 bp, synthetic construct
  misc_feature 1..21: note = Description of Artificial Sequence: Synthetic oligonucleotide
  source 1..21: mol_type = other DNA
gatcagggtaatggttatggg

SEQ ID NO: 44265 - DNA, 21 bp, synthetic construct
  misc_feature 1..21: note = Description of Artificial Sequence: Synthetic oligonucleotide
  source 1..21: mol_type = other DNA
tgcagaagcgcccccaccaga

SEQ ID NO: 44266 - DNA, 21 bp, synthetic construct
  misc_feature 1..21: note = Description of Artificial Sequence: Synthetic oligonucleotide
  source 1..21: mol_type = other DNA
gacagcaaacaaaacctcacc

SEQ ID NO: 44267 - DNA, 21 bp, synthetic construct
  misc_feature 1..21: note = Description of Artificial Sequence: Synthetic oligonucleotide
  source 1..21: mol_type = other DNA
aacggcagcgcccaaaaccaa

SEQ ID NO: 44268 - DNA, 21 bp, synthetic construct
  misc_feature 1..21: note = Description of Artificial Sequence: Synthetic oligonucleotide
  source 1..21: mol_type = other DNA
ctcagagaaggcgaaagaacc

SEQ ID NO: 44269 - DNA, 21 bp, synthetic construct
  misc_feature 1..21: note = Description of Artificial Sequence: Synthetic oligonucleotide
  source 1..21: mol_type = other DNA
tctactagtcgtctgccgagt

SEQ ID NO: 44270 - DNA, 21 bp, synthetic construct
  misc_feature 1..21: note = Description of Artificial Sequence: Synthetic oligonucleotide
  source 1..21: mol_type = other DNA
tcttcgtcggcgaagtctatt

SEQ ID NO: 44271 - DNA, 21 bp, synthetic construct
  misc_feature 1..21: note = Description of Artificial Sequence: Synthetic oligonucleotide
  source 1..21: mol_type = other DNA
ggtcatgtgtcttcgtatatg

SEQ ID NO: 44272 - DNA, 21 bp, synthetic construct
  misc_feature 1..21: note = Description of Artificial Sequence: Synthetic oligonucleotide
  source 1..21: mol_type = other DNA
caagccaaaaacatccacagc

SEQ ID NO: 44273 - DNA, 21 bp, synthetic construct
  misc_feature 1..21: note = Description of Artificial Sequence: Synthetic oligonucleotide
  source 1..21: mol_type = other DNA
cttaatagtatgtctcctagg

SEQ ID NO: 44274 - DNA, 21 bp, synthetic construct
  misc_feature 1..21: note = Description of Artificial Sequence: Synthetic oligonucleotide
  source 1..21: mol_type = other DNA
atgagtcatactaataggccg

SEQ ID NO: 44275 - DNA, 21 bp, synthetic construct
  misc_feature 1..21: note = Description of Artificial Sequence: Synthetic oligonucleotide
  source 1..21: mol_type = other DNA
gggtcgaataggatgagtagt

SEQ ID NO: 44276 - DNA, 21 bp, synthetic construct
  misc_feature 1..21: note = Description of Artificial Sequence: Synthetic oligonucleotide
  source 1..21: mol_type = other DNA
cacatgaacagaaaactcgaa

SEQ ID NO: 44277 - DNA, 21 bp, synthetic construct
  misc_feature 1..21: note = Description of Artificial Sequence: Synthetic oligonucleotide
  source 1..21: mol_type = other DNA
tctgataggtcggttgatggg

SEQ ID NO: 44278 - DNA, 21 bp, synthetic construct
  misc_feature 1..21: note = Description of Artificial Sequence: Synthetic oligonucleotide
  source 1..21: mol_type = other DNA
catacggctaatagtcagagt

SEQ ID NO: 44279 - DNA, 21 bp, synthetic construct
  misc_feature 1..21: note = Description of Artificial Sequence: Synthetic oligonucleotide
  source 1..21: mol_type = other DNA
cctagtactggtaattcggtg

SEQ ID NO: 44280 - DNA, 21 bp, synthetic construct
  misc_feature 1..21: note = Description of Artificial Sequence: Synthetic oligonucleotide
  source 1..21: mol_type = other DNA
actagtcatatgcagcttagt

SEQ ID NO: 44281 - DNA, 21 bp, synthetic construct
  misc_feature 1..21: note = Description of Artificial Sequence: Synthetic oligonucleotide
  source 1..21: mol_type = other DNA
gtgagtgataatacttataag

SEQ ID NO: 44282 - DNA, 21 bp, synthetic construct
  misc_feature 1..21: note = Description of Artificial Sequence: Synthetic oligonucleotide
  source 1..21: mol_type = other DNA
tttcggcagactagtgggaat

SEQ ID NO: 44283 - DNA, 21 bp, synthetic construct
  misc_feature 1..21: note = Description of Artificial Sequence: Synthetic oligonucleotide
  source 1..21: mol_type = other DNA
gtgcatacttcgggggtgcag

SEQ ID NO: 44284 - DNA, 21 bp, synthetic construct
  misc_feature 1..21: note = Description of Artificial Sequence: Synthetic oligonucleotide
  source 1..21: mol_type = other DNA
cctcagtcgtctcatcagacg

SEQ ID NO: 44285 - DNA, 21 bp, synthetic construct
  misc_feature 1..21: note = Description of Artificial Sequence: Synthetic oligonucleotide
  source 1..21: mol_type = other DNA
cacggcatggaagtcgccaga

SEQ ID NO: 44286 - DNA, 21 bp, synthetic construct
  misc_feature 1..21: note = Description of Artificial Sequence: Synthetic oligonucleotide
  source 1..21: mol_type = other DNA
actgaggctcggtcggcgaat

SEQ ID NO: 44287 - DNA, 21 bp, synthetic construct
  misc_feature 1..21: note = Description of Artificial Sequence: Synthetic oligonucleotide
  source 1..21: mol_type = other DNA
tctaatacgaatgctgctatg

SEQ ID NO: 44288 - DNA, 21 bp, synthetic construct
  misc_feature 1..21: note = Description of Artificial Sequence: Synthetic oligonucleotide
  source 1..21: mol_type = other DNA
caactcggcgacagaaacaga

SEQ ID NO: 44289 - DNA, 21 bp, synthetic construct
  misc_feature 1..21: note = Description of Artificial Sequence: Synthetic oligonucleotide
  source 1..21: mol_type = other DNA
actccgagtgttactaatatg

SEQ ID NO: 44290 - DNA, 21 bp, synthetic construct
  misc_feature 1..21: note = Description of Artificial Sequence: Synthetic oligonucleotide
  source 1..21: mol_type = other DNA
aatttgggtaattctctgaag

SEQ ID NO: 44291 - DNA, 21 bp, synthetic construct
  misc_feature 1..21: note = Description of Artificial Sequence: Synthetic oligonucleotide
  source 1..21: mol_type = other DNA
agtctgattacgatgaaggat

SEQ ID NO: 44292 - DNA, 21 bp, synthetic construct
  misc_feature 1..21: note = Description of Artificial Sequence: Synthetic oligonucleotide
  source 1..21: mol_type = other DNA
tcgagtccgtctaatatggcg

SEQ ID NO: 44293 - DNA, 21 bp, synthetic construct
  misc_feature 1..21: note = Description of Artificial Sequence: Synthetic oligonucleotide
  source 1..21: mol_type = other DNA
cccagcctcgaaagaggcagc

SEQ ID NO: 44294 - DNA, 21 bp, synthetic construct
  misc_feature 1..21: note = Description of Artificial Sequence: Synthetic oligonucleotide
  source 1..21: mol_type = other DNA
caaaccagcagccacgcctac

SEQ ID NO: 44295 - DNA, 21 bp, synthetic construct
  misc_feature 1..21: note = Description of Artificial Sequence: Synthetic oligonucleotide
  source 1..21: mol_type = other DNA
ggcgtcgaaagaatgagaggc

SEQ ID NO: 44296 - DNA, 21 bp, synthetic construct
  misc_feature 1..21: note = Description of Artificial Sequence: Synthetic oligonucleotide
  source 1..21: mol_type = other DNA
gactacagcgaaaccagaaga

SEQ ID NO: 44297 - DNA, 21 bp, synthetic construct
  misc_feature 1..21: note = Description of Artificial Sequence: Synthetic oligonucleotide
  source 1..21: mol_type = other DNA
ttccccaacgtcaacagcgcc

SEQ ID NO: 44298 - DNA, 21 bp, synthetic construct
  misc_feature 1..21: note = Description of Artificial Sequence: Synthetic oligonucleotide
  source 1..21: mol_type = other DNA
catggttctaagccgtatatt

SEQ ID NO: 44299 - DNA, 21 bp, synthetic construct
  misc_feature 1..21: note = Description of Artificial Sequence: Synthetic oligonucleotide
  source 1..21: mol_type = other DNA
agatacccccccgccacccac

SEQ ID NO: 44300 - DNA, 21 bp, synthetic construct
  misc_feature 1..21: note = Description of Artificial Sequence: Synthetic oligonucleotide
  source 1..21: mol_type = other DNA
gctacggtttctaagacggct

SEQ ID NO: 44301 - DNA, 21 bp, synthetic construct
  misc_feature 1..21: note = Description of Artificial Sequence: Synthetic oligonucleotide
  source 1..21: mol_type = other DNA
ggtccggatacgcattctcag

SEQ ID NO: 44302 - DNA, 21 bp, synthetic construct
  misc_feature 1..21: note = Description of Artificial Sequence: Synthetic oligonucleotide
  source 1..21: mol_type = other DNA
ggggatctgaatcctccttct

SEQ ID NO: 44303 - DNA, 21 bp, synthetic construct
  misc_feature 1..21: note = Description of Artificial Sequence: Synthetic oligonucleotide
  source 1..21: mol_type = other DNA
gctcagcgtaatatttcttcg

SEQ ID NO: 44304 - DNA, 21 bp, synthetic construct
  misc_feature 1..21: note = Description of Artificial Sequence: Synthetic oligonucleotide
  source 1..21: mol_type = other DNA
cggactaatgttatggcgggg

SEQ ID NO: 44305 - DNA, 21 bp, synthetic construct
  misc_feature 1..21: note = Description of Artificial Sequence: Synthetic oligonucleotide
  source 1..21: mol_type = other DNA
acccccacccccgtcaaccaa

SEQ ID NO: 44306 - DNA, 21 bp, synthetic construct
  misc_feature 1..21: note = Description of Artificial Sequence: Synthetic oligonucleotide
  source 1..21: mol_type = other DNA
attcatgcgactagtctggct

SEQ ID NO: 44307 - DNA, 21 bp, synthetic construct
  misc_feature 1..21: note = Description of Artificial Sequence: Synthetic oligonucleotide
  source 1..21: mol_type = other DNA
cagagtgagattgtgaataag

SEQ ID NO: 44308 - DNA, 21 bp, synthetic construct
  misc_feature 1..21: note = Description of Artificial Sequence: Synthetic oligonucleotide
  source 1..21: mol_type = other DNA
ttcaacagcagcagcagcaaa

SEQ ID NO: 44309 - DNA, 21 bp, synthetic construct
  misc_feature 1..21: note = Description of Artificial Sequence: Synthetic oligonucleotide
  source 1..21: mol_type = other DNA
tggcagacgggttcgactatg

SEQ ID NO: 44310 - DNA, 21 bp, synthetic construct
  misc_feature 1..21: note = Description of Artificial Sequence: Synthetic oligonucleotide
  source 1..21: mol_type = other DNA
accagcctcagccccagcgtc

SEQ ID NO: 44311 - DNA, 21 bp, synthetic construct
  misc_feature 1..21: note = Description of Artificial Sequence: Synthetic oligonucleotide
  source 1..21: mol_type = other DNA
tattctactcatttgaataat

SEQ ID NO: 44312 - DNA, 21 bp, synthetic construct
  misc_feature 1..21: note = Description of Artificial Sequence: Synthetic oligonucleotide
  source 1..21: mol_type = other DNA
gtgactaattctgctcctact

SEQ ID NO: 44313 - DNA, 21 bp, synthetic construct
  misc_feature 1..21: note = Description of Artificial Sequence: Synthetic oligonucleotide
  source 1..21: mol_type = other DNA
caggataagcataatcctggt

SEQ ID NO: 44314 - DNA, 21 bp, synthetic construct
  misc_feature 1..21: note = Description of Artificial Sequence: Synthetic oligonucleotide
  source 1..21: mol_type = other DNA
gatgggggtaatcagaggagt

SEQ ID NO: 44315 - DNA, 21 bp, synthetic construct
  misc_feature 1..21: note = Description of Artificial Sequence: Synthetic oligonucleotide
  source 1..21: mol_type = other DNA
catcagcctgagaagattgct

SEQ ID NO: 44316 - DNA, 21 bp, synthetic construct
  misc_feature 1..21: note = Description of Artificial Sequence: Synthetic oligonucleotide
  source 1..21: mol_type = other DNA
tacatcgacgccagcgccaga

SEQ ID NO: 44317 - DNA, 21 bp, synthetic construct
  misc_feature 1..21: note = Description of Artificial Sequence: Synthetic oligonucleotide
  source 1..21: mol_type = other DNA
aatatttcgtctaaggttgcg

SEQ ID NO: 44318 - DNA, 21 bp, synthetic construct
  misc_feature 1..21: note = Description of Artificial Sequence: Synthetic oligonucleotide
  source 1..21: mol_type = other DNA
atggccaccgcccacggcggc

SEQ ID NO: 44319 - DNA, 21 bp, synthetic construct
  misc_feature 1..21: note = Description of Artificial Sequence: Synthetic oligonucleotide
  source 1..21: mol_type = other DNA
tgcagcaccggcaccagaaaa

SEQ ID NO: 44320 - DNA, 21 bp, synthetic construct
  misc_feature 1..21: note = Description of Artificial Sequence: Synthetic oligonucleotide
  source 1..21: mol_type = other DNA
agtgggtctctttcttctgct

SEQ ID NO: 44321 - DNA, 21 bp, synthetic construct
  misc_feature 1..21: note = Description of Artificial Sequence: Synthetic oligonucleotide
  source 1..21: mol_type = other DNA
aacctcaaaaaccaagtcgcc

SEQ ID NO: 44322 - DNA, 21 bp, synthetic construct
  misc_feature 1..21: note = Description of Artificial Sequence: Synthetic oligonucleotide
  source 1..21: mol_type = other DNA
cctcgggagaataagttttct

SEQ ID NO: 44323 - DNA, 21 bp, synthetic construct
  misc_feature 1..21: note = Description of Artificial Sequence: Synthetic oligonucleotide
  source 1..21: mol_type = other DNA
ggtgcgcgtccggtgcttcag

SEQ ID NO: 44324 - DNA, 21 bp, synthetic construct
  misc_feature 1..21: note = Description of Artificial Sequence: Synthetic oligonucleotide
  source 1..21: mol_type = other DNA
aatttttctaatcctacggtg

SEQ ID NO: 44325 - DNA, 21 bp, synthetic construct
  misc_feature 1..21: note = Description of Artificial Sequence: Synthetic oligonucleotide
  source 1..21: mol_type = other DNA
cttggtaatgcgcatcagctt

SEQ ID NO: 44326 - DNA, 21 bp, synthetic construct
  misc_feature 1..21: note = Description of Artificial Sequence: Synthetic oligonucleotide
  source 1..21: mol_type = other DNA
cacacccccgacgtcggcaaa

SEQ ID NO: 44327 - DNA, 21 bp, synthetic construct
  misc_feature 1..21: note = Description of Artificial Sequence: Synthetic oligonucleotide
  source 1..21: mol_type = other DNA
gtcaaaagcaacaacctcccc

SEQ ID NO: 44328 - DNA, 21 bp, synthetic construct
  misc_feature 1..21: note = Description of Artificial Sequence: Synthetic oligonucleotide
  source 1..21: mol_type = other DNA
cccagaaaagacgacagcatg

SEQ ID NO: 44329 - DNA, 21 bp, synthetic construct
  misc_feature 1..21: note = Description of Artificial Sequence: Synthetic oligonucleotide
  source 1..21: mol_type = other DNA
ggggttccggctgggcatact

SEQ ID NO: 44330 - DNA, 21 bp, synthetic construct
  misc_feature 1..21: note = Description of Artificial Sequence: Synthetic oligonucleotide
  source 1..21: mol_type = other DNA
gatcgtgaggctacttctcgg

SEQ ID NO: 44331 - DNA, 21 bp, synthetic construct
  misc_feature 1..21: note = Description of Artificial Sequence: Synthetic oligonucleotide
  source 1..21: mol_type = other DNA
gccagagccgacagcaacttc

SEQ ID NO: 44332 - DNA, 21 bp, synthetic construct
  misc_feature 1..21: note = Description of Artificial Sequence: Synthetic oligonucleotide
  source 1..21: mol_type = other DNA
gggactgttgataaggcgtct

SEQ ID NO: 44333 - DNA, 21 bp, synthetic construct
  misc_feature 1..21: note = Description of Artificial Sequence: Synthetic oligonucleotide
  source 1..21: mol_type = other DNA
aggtcgactaatacggataat

SEQ ID NO: 44334 - DNA, 21 bp, synthetic construct
  misc_feature 1..21: note = Description of Artificial Sequence: Synthetic oligonucleotide
  source 1..21: mol_type = other DNA
acgggtgcgggtggttattgt

SEQ ID NO: 44335 - DNA, 21 bp, synthetic construct
  misc_feature 1..21: note = Description of Artificial Sequence: Synthetic oligonucleotide
  source 1..21: mol_type = other DNA
tatattcataatcagactggt

SEQ ID NO: 44336 - DNA, 21 bp, synthetic construct
  misc_feature 1..21: note = Description of Artificial Sequence: Synthetic oligonucleotide
  source 1..21: mol_type = other DNA
cgtacggtgccttcgagtctt

SEQ ID NO: 44337 - DNA, 21 bp, synthetic construct
  misc_feature 1..21: note = Description of Artificial Sequence: Synthetic oligonucleotide
  source 1..21: mol_type = other DNA
gccatgagcagcaacaacggc

SEQ ID NO: 44338 - DNA, 21 bp, synthetic construct
  misc_feature 1..21: note = Description of Artificial Sequence: Synthetic oligonucleotide
  source 1..21: mol_type = other DNA
ggcggccacaaaagcctcaac

SEQ ID NO: 44339 - DNA, 21 bp, synthetic construct
  misc_feature 1..21: note = Description of Artificial Sequence: Synthetic oligonucleotide
  source 1..21: mol_type = other DNA
gccttcggcggcgaaaccaaa

SEQ ID NO: 44340 - DNA, 21 bp, synthetic construct
  misc_feature 1..21: note = Description of Artificial Sequence: Synthetic oligonucleotide
  source 1..21: mol_type = other DNA
caggggtctgggagtaatcat

SEQ ID NO: 44341 - DNA, 21 bp, synthetic construct
  misc_feature 1..21: note = Description of Artificial Sequence: Synthetic oligonucleotide
  source 1..21: mol_type = other DNA
tgtctgcggtcttcgagtaat

SEQ ID NO: 44342 - DNA, 21 bp, synthetic construct
  misc_feature 1..21: note = Description of Artificial Sequence: Synthetic oligonucleotide
  source 1..21: mol_type = other DNA
gagaatcggacttctgttcag

SEQ ID NO: 44343 - DNA, 21 bp, synthetic construct
  misc_feature 1..21: note = Description of Artificial Sequence: Synthetic oligonucleotide
  source 1..21: mol_type = other DNA
aacagcgtcgccggcatgggc

SEQ ID NO: 44344 - DNA, 21 bp, synthetic construct
  misc_feature 1..21: note = Description of Artificial Sequence: Synthetic oligonucleotide
  source 1..21: mol_type = other DNA
agcagacacgacggcaaaggc

SEQ ID NO: 44345 - DNA, 21 bp, synthetic construct
  misc_feature 1..21: note = Description of Artificial Sequence: Synthetic oligonucleotide
  source 1..21: mol_type = other DNA
caaaaaacccaaaccaccagc

SEQ ID NO: 44346 - DNA, 21 bp, synthetic construct
  misc_feature 1..21: note = Description of Artificial Sequence: Synthetic oligonucleotide
  source 1..21: mol_type = other DNA
cataggttgccttctcattct

SEQ ID NO: 44347 - DNA, 21 bp, synthetic construct
  misc_feature 1..21: note = Description of Artificial Sequence: Synthetic oligonucleotide
  source 1..21: mol_type = other DNA
aataataggagtgggatgggt

SEQ ID NO: 44348 - DNA, 21 bp, synthetic construct
  misc_feature 1..21: note = Description of Artificial Sequence: Synthetic oligonucleotide
  source 1..21: mol_type = other DNA
ggcgccaaagaaagccaaagc

SEQ ID NO: 44349 - DNA, 21 bp, synthetic construct
  misc_feature 1..21: note = Description of Artificial Sequence: Synthetic oligonucleotide
  source 1..21: mol_type = other DNA
atgactgagagtagtcggact

SEQ ID NO: 44350 - DNA, 21 bp, synthetic construct
  misc_feature 1..21: note = Description of Artificial Sequence: Synthetic oligonucleotide
  source 1..21: mol_type = other DNA
acggagcaggttggtacgcgt

SEQ ID NO: 44351 - DNA, 21 bp, synthetic construct
  misc_feature 1..21: note = Description of Artificial Sequence: Synthetic oligonucleotide
  source 1..21: mol_type = other DNA
gacgtcctcagcaaaagccaa

SEQ ID NO: 44352 - DNA, 21 bp, synthetic construct
  misc_feature 1..21: note = Description of Artificial Sequence: Synthetic oligonucleotide
  source 1..21: mol_type = other DNA
caaggcagcagcctcagaacc

SEQ ID NO: 44353 - DNA, 21 bp, synthetic construct
  misc_feature 1..21: note = Description of Artificial Sequence: Synthetic oligonucleotide
  source 1..21: mol_type = other DNA
cttggtattatggataagggg

SEQ ID NO: 44354 - DNA, 21 bp, synthetic construct
  misc_feature 1..21: note = Description of Artificial Sequence: Synthetic oligonucleotide
  source 1..21: mol_type = other DNA
ccgatgattaattcgagtgat

SEQ ID NO: 44355 - DNA, 21 bp, synthetic construct
  misc_feature 1..21: note = Description of Artificial Sequence: Synthetic oligonucleotide
  source 1..21: mol_type = other DNA
ggggcttataatcatgttacg

SEQ ID NO: 44356 - DNA, 21 bp, synthetic construct
  misc_feature 1..21: note = Description of Artificial Sequence: Synthetic oligonucleotide
  source 1..21: mol_type = other DNA
attacttcggctagtccgtgt

SEQ ID NO: 44357 - DNA, 21 bp, synthetic construct
  misc_feature 1..21: note = Description of Artificial Sequence: Synthetic oligonucleotide
  source 1..21: mol_type = other DNA
acgtctaggggtaatttgtct

SEQ ID NO: 44358 - DNA, 21 bp, synthetic construct
  misc_feature 1..21: note = Description of Artificial Sequence: Synthetic oligonucleotide
  source 1..21: mol_type = other DNA
actccgggtagtacgattagg

SEQ ID NO: 44359 - DNA, 21 bp, synthetic construct
  misc_feature 1..21: note = Description of Artificial Sequence: Synthetic oligonucleotide
  source 1..21: mol_type = other DNA
ggtcctgataatggtattcag

SEQ ID NO: 44360 - DNA, 21 bp, synthetic construct
  misc_feature 1..21: note = Description of Artificial Sequence: Synthetic oligonucleotide
  source 1..21: mol_type = other DNA
tacagcatgagacccaccgaa

SEQ ID NO: 44361 - DNA, 21 bp, synthetic construct
  misc_feature 1..21: note = Description of Artificial Sequence: Synthetic oligonucleotide
  source 1..21: mol_type = other DNA
gatatggtgagtccgcggaat

SEQ ID NO: 44362 - DNA, 21 bp, synthetic construct
  misc_feature 1..21: note = Description of Artificial Sequence: Synthetic oligonucleotide
  source 1..21: mol_type = other DNA
aagaatcaggcgccgttgctt

SEQ ID NO: 44363 - DNA, 21 bp, synthetic construct
  misc_feature 1..21: note = Description of Artificial Sequence: Synthetic oligonucleotide
  source 1..21: mol_type = other DNA
ctcgacgccggcgtcgccaga

SEQ ID NO: 44364 - DNA, 21 bp, synthetic construct
  misc_feature 1..21: note = Description of Artificial Sequence: Synthetic oligonucleotide
  source 1..21: mol_type = other DNA
cccagaaccagagaaaaccaa

SEQ ID NO: 44365 - DNA, 21 bp, synthetic construct
  misc_feature 1..21: note = Description of Artificial Sequence: Synthetic oligonucleotide
  source 1..21: mol_type = other DNA
agaaccagcagcacctacagc

SEQ ID NO: 44366 - DNA, 21 bp, synthetic construct
  misc_feature 1..21: note = Description of Artificial Sequence: Synthetic oligonucleotide
  source 1..21: mol_type = other DNA
agtgttgttgcgcatggtcct

SEQ ID NO: 44367 - DNA, 21 bp, synthetic construct
  misc_feature 1..21: note = Description of Artificial Sequence: Synthetic oligonucleotide
  source 1..21: mol_type = other DNA
aatccggtggctgcggctacg

SEQ ID NO: 44368 - DNA, 21 bp, synthetic construct
  misc_feature 1..21: note = Description of Artificial Sequence: Synthetic oligonucleotide
  source 1..21: mol_type = other DNA
ctcgcccaagaaagaggcacc

SEQ ID NO: 44369 - DNA, 21 bp, synthetic construct
  misc_feature 1..21: note = Description of Artificial Sequence: Synthetic oligonucleotide
  source 1..21: mol_type = other DNA
gcgcataagtctgcgatgaat

SEQ ID NO: 44370 - DNA, 21 bp, synthetic construct
  misc_feature 1..21: note = Description of Artificial Sequence: Synthetic oligonucleotide
  source 1..21: mol_type = other DNA
ttgactcagagggatttttcg

SEQ ID NO: 44371 - DNA, 21 bp, synthetic construct
  misc_feature 1..21: note = Description of Artificial Sequence: Synthetic oligonucleotide
  source 1..21: mol_type = other DNA
cagtctggtaatacgattcag

SEQ ID NO: 44372 - DNA, 21 bp, synthetic construct
  misc_feature 1..21: note = Description of Artificial Sequence: Synthetic oligonucleotide
  source 1..21: mol_type = other DNA
aatctgaattctgttagtaag

SEQ ID NO: 44373 - DNA, 21 bp, synthetic construct
  misc_feature 1..21: note = Description of Artificial Sequence: Synthetic oligonucleotide
  source 1..21: mol_type = other DNA
tatggttcgaatacgccgact

SEQ ID NO: 44374 - DNA, 21 bp, synthetic construct
  misc_feature 1..21: note = Description of Artificial Sequence: Synthetic oligonucleotide
  source 1..21: mol_type = other DNA
cgtgagggtggtcagatggtg

SEQ ID NO: 44375 - DNA, 21 bp, synthetic construct
  misc_feature 1..21: note = Description of Artificial Sequence: Synthetic oligonucleotide
  source 1..21: mol_type = other DNA
aatgatcaggctaagttgacg

SEQ ID NO: 44376 - DNA, 21 bp, synthetic construct
  misc_feature 1..21: note = Description of Artificial Sequence: Synthetic oligonucleotide
  source 1..21: mol_type = other DNA
gttagtgggactaagattgag

SEQ ID NO: 44377 - DNA, 21 bp, synthetic construct
  misc_feature 1..21: note = Description of Artificial Sequence: Synthetic oligonucleotide
  source 1..21: mol_type = other DNA
cagagtcatggtattacgaat

SEQ ID NO: 44378 - DNA, 21 bp, synthetic construct
  misc_feature 1..21: note = Description of Artificial Sequence: Synthetic oligonucleotide
  source 1..21: mol_type = other DNA
catcgggttgataatcagggg

SEQ ID NO: 44379 - DNA, 21 bp, synthetic construct
  misc_feature 1..21: note = Description of Artificial Sequence: Synthetic oligonucleotide
  source 1..21: mol_type = other DNA
catagtacttctgggggtcat

SEQ ID NO: 44380 - DNA, 21 bp, synthetic construct
  misc_feature 1..21: note = Description of Artificial Sequence: Synthetic oligonucleotide
  source 1..21: mol_type = other DNA
agcgacagcagaaaccccgtc

SEQ ID NO: 44381 - DNA, 21 bp, synthetic construct
  misc_feature 1..21: note = Description of Artificial Sequence: Synthetic oligonucleotide
  source 1..21: mol_type = other DNA
gacatcaacagacaaagaacc

SEQ ID NO: 44382 - DNA, 21 bp, synthetic construct
  misc_feature 1..21: note = Description of Artificial Sequence: Synthetic oligonucleotide
  source 1..21: mol_type = other DNA
cccggcaccggcagcaaccac

SEQ ID NO: 44383 - DNA, 21 bp, synthetic construct
  misc_feature 1..21: note = Description of Artificial Sequence: Synthetic oligonucleotide
  source 1..21: mol_type = other DNA
agccacgacaacggccaaagc

SEQ ID NO: 44384 - DNA, 21 bp, synthetic construct
  misc_feature 1..21: note = Description of Artificial Sequence: Synthetic oligonucleotide
  source 1..21: mol_type = other DNA
gttcttcataatgctagtagt

SEQ ID NO: 44385 - DNA, 21 bp, synthetic construct
  misc_feature 1..21: note = Description of Artificial Sequence: Synthetic oligonucleotide
  source 1..21: mol_type = other DNA
tattctggtgctagtggtcgt

SEQ ID NO: 44386 - DNA, 21 bp, synthetic construct
  misc_feature 1..21: note = Description of Artificial Sequence: Synthetic oligonucleotide
  source 1..21: mol_type = other DNA
agagaccacagcggcagcaga

SEQ ID NO: 44387 - DNA, 21 bp, synthetic construct
  misc_feature 1..21: note = Description of Artificial Sequence: Synthetic oligonucleotide
  source 1..21: mol_type = other DNA
ggggtgaatttgcatgcggat

SEQ ID NO: 44388 - DNA, 21 bp, synthetic construct
  misc_feature 1..21: note = Description of Artificial Sequence: Synthetic oligonucleotide
  source 1..21: mol_type = other DNA
gttaatggtcatggggttagt

SEQ ID NO: 44389 - DNA, 21 bp, synthetic construct
  misc_feature 1..21: note = Description of Artificial Sequence: Synthetic oligonucleotide
  source 1..21: mol_type = other DNA
gatccgttggggaagcagggt

SEQ ID NO: 44390 - DNA, 21 bp, synthetic construct
  misc_feature 1..21: note = Description of Artificial Sequence: Synthetic oligonucleotide
  source 1..21: mol_type = other DNA
tttgtttcgcgggagcatact

SEQ ID NO: 44391 - DNA, 21 bp, synthetic construct
  misc_feature 1..21: note = Description of Artificial Sequence: Synthetic oligonucleotide
  source 1..21: mol_type = other DNA
aattctgcggctgctcctgct

SEQ ID NO: 44392 - DNA, 21 bp, synthetic construct
  misc_feature 1..21: note = Description of Artificial Sequence: Synthetic oligonucleotide
  source 1..21: mol_type = other DNA
cacaccaccggcatcctcggc

SEQ ID NO: 44393 - DNA, 21 bp, synthetic construct
  misc_feature 1..21: note = Description of Artificial Sequence: Synthetic oligonucleotide
  source 1..21: mol_type = other DNA
aatgcgcaggttacgactggt

SEQ ID NO: 44394 - DNA, 21 bp, synthetic construct
  misc_feature 1..21: note = Description of Artificial Sequence: Synthetic oligonucleotide
  source 1..21: mol_type = other DNA
tatgcgcagtctccttcttcg

SEQ ID NO: 44395 - DNA, 21 bp, synthetic construct
  misc_feature 1..21: note = Description of Artificial Sequence: Synthetic oligonucleotide
  source 1..21: mol_type = other DNA
aatattgctcagaaggatttg

SEQ ID NO: 44396 - DNA, 21 bp, synthetic construct
  misc_feature 1..21: note = Description of Artificial Sequence: Synthetic oligonucleotide
  source 1..21: mol_type = other DNA
atgattcgggatggtagttct

SEQ ID NO: 44397 - DNA, 21 bp, synthetic construct
  misc_feature 1..21: note = Description of Artificial Sequence: Synthetic oligonucleotide
  source 1..21: mol_type = other DNA
cccaacggccacgaagtcctc

SEQ ID NO: 44398 - DNA, 21 bp, synthetic construct
  misc_feature 1..21: note = Description of Artificial Sequence: Synthetic oligonucleotide
  source 1..21: mol_type = other DNA
tctgtgagttctcctagggat

SEQ ID NO: 44399 - DNA, 21 bp, synthetic construct
  misc_feature 1..21: note = Description of Artificial Sequence: Synthetic oligonucleotide
  source 1..21: mol_type = other DNA
agaaccctcagaagcgtcgac

SEQ ID NO: 44400 - DNA, 21 bp, synthetic construct
  misc_feature 1..21: note = Description of Artificial Sequence: Synthetic oligonucleotide
  source 1..21: mol_type = other DNA
aattctcataatggtgcttct

SEQ ID NO: 44401 - DNA, 21 bp, synthetic construct
  misc_feature 1..21: note = Description of Artificial Sequence: Synthetic oligonucleotide
  source 1..21: mol_type = other DNA
actttgcctacgaagtatccg

SEQ ID NO: 44402 - DNA, 21 bp, synthetic construct
  misc_feature 1..21: note = Description of Artificial Sequence: Synthetic oligonucleotide
  source 1..21: mol_type = other DNA
ctgagtacggcgaataagtct

SEQ ID NO: 44403 - DNA, 21 bp, synthetic construct
  misc_feature 1..21: note = Description of Artificial Sequence: Synthetic oligonucleotide
  source 1..21: mol_type = other DNA
tatccgaattctgtgcctagt

SEQ ID NO: 44404 - DNA, 21 bp, synthetic construct
  misc_feature 1..21: note = Description of Artificial Sequence: Synthetic oligonucleotide
  source 1..21: mol_type = other DNA
atcatcagccaacacggcatg

SEQ ID NO: 44405 - DNA, 21 bp, synthetic construct
  misc_feature 1..21: note = Description of Artificial Sequence: Synthetic oligonucleotide
  source 1..21: mol_type = other DNA
cccggccccgaagtcggcaga

SEQ ID NO: 44406 - DNA, 21 bp, synthetic construct
  misc_feature 1..21: note = Description of Artificial Sequence: Synthetic oligonucleotide
  source 1..21: mol_type = other DNA
gccaccaacaaaaccaccaac

SEQ ID NO: 44407 - DNA, 21 bp, synthetic construct
  misc_feature 1..21: note = Description of Artificial Sequence: Synthetic oligonucleotide
  source 1..21: mol_type = other DNA
ttgcctcatcatacttctgcg

SEQ ID NO: 44408 - DNA, 21 bp, synthetic construct
  misc_feature 1..21: note = Description of Artificial Sequence: Synthetic oligonucleotide
  source 1..21: mol_type = other DNA
tcttatggtggtcagtcgagg

SEQ ID NO: 44409 - DNA, 21 bp, synthetic construct
  misc_feature 1..21: note = Description of Artificial Sequence: Synthetic oligonucleotide
  source 1..21: mol_type = other DNA
catatggctgcttcgacgggt

SEQ ID NO: 44410 - DNA, 21 bp, synthetic construct
  misc_feature 1..21: note = Description of Artificial Sequence: Synthetic oligonucleotide
  source 1..21: mol_type = other DNA
cccatccacaccagaatcgac

SEQ ID NO: 44411 - DNA, 21 bp, synthetic construct
  misc_feature 1..21: note = Description of Artificial Sequence: Synthetic oligonucleotide
  source 1..21: mol_type = other DNA
cccagaagcctcagcaccagc

SEQ ID NO: 44412 - DNA, 21 bp, synthetic construct
  misc_feature 1..21: note = Description of Artificial Sequence: Synthetic oligonucleotide
  source 1..21: mol_type = other DNA
agggctggtaatgctcctact

SEQ ID NO: 44413 - DNA, 21 bp, synthetic construct
  misc_feature 1..21: note = Description of Artificial Sequence: Synthetic oligonucleotide
  source 1..21: mol_type = other DNA
ccctacgccggcaaccaaaga

SEQ ID NO: 44414 - DNA, 21 bp, synthetic construct
  misc_feature 1..21: note = Description of Artificial Sequence: Synthetic oligonucleotide
  source 1..21: mol_type = other DNA
tcgagggattctagtattcat

SEQ ID NO: 44415 - DNA, 21 bp, synthetic construct
  misc_feature 1..21: note = Description of Artificial Sequence: Synthetic oligonucleotide
  source 1..21: mol_type = other DNA
aacgtcaccacccccctcatc

SEQ ID NO: 44416 - DNA, 21 bp, synthetic construct
  misc_feature 1..21: note = Description of Artificial Sequence: Synthetic oligonucleotide
  source 1..21: mol_type = other DNA
agcaaccaagtcagacaaatc

SEQ ID NO: 44417 - DNA, 21 bp, synthetic construct
  misc_feature 1..21: note = Description of Artificial Sequence: Synthetic oligonucleotide
  source 1..21: mol_type = other DNA
acgctggataatcataggtct

SEQ ID NO: 44418 - DNA, 21 bp, synthetic construct
  misc_feature 1..21: note = Description of Artificial Sequence: Synthetic oligonucleotide
  source 1..21: mol_type = other DNA
gaactccacagcaaaaacgcc

SEQ ID NO: 44419 - DNA, 21 bp, synthetic construct
  misc_feature 1..21: note = Description of Artificial Sequence: Synthetic oligonucleotide
  source 1..21: mol_type = other DNA
cggtcttatgatccgaatcgg

SEQ ID NO: 44420 - DNA, 21 bp, synthetic construct
  misc_feature 1..21: note = Description of Artificial Sequence: Synthetic oligonucleotide
  source 1..21: mol_type = other DNA
ctccccaccgacagcctcaga

SEQ ID NO: 44421 - DNA, 21 bp, synthetic construct
  misc_feature 1..21: note = Description of Artificial Sequence: Synthetic oligonucleotide
  source 1..21: mol_type = other DNA
gaggttactaattcgcctagg

SEQ ID NO: 44422 - DNA, 21 bp, synthetic construct
  misc_feature 1..21: note = Description of Artificial Sequence: Synthetic oligonucleotide
  source 1..21: mol_type = other DNA
ggcggccaaaccgccagaatc

SEQ ID NO: 44423 - DNA, 21 bp, synthetic construct
  misc_feature 1..21: note = Description of Artificial Sequence: Synthetic oligonucleotide
  source 1..21: mol_type = other DNA
agcgccggcggcgccgtcagc

SEQ ID NO: 44424 - DNA, 21 bp, synthetic construct
  misc_feature 1..21: note = Description of Artificial Sequence: Synthetic oligonucleotide
  source 1..21: mol_type = other DNA
cccagccacggcccccccgcc

SEQ ID NO: 44425 - DNA, 21 bp, synthetic construct
  misc_feature 1..21: note = Description of Artificial Sequence: Synthetic oligonucleotide
  source 1..21: mol_type = other DNA
tacaccgccgccagccacaga

SEQ ID NO: 44426 - DNA, 21 bp, synthetic construct
  misc_feature 1..21: note = Description of Artificial Sequence: Synthetic oligonucleotide
  source 1..21: mol_type = other DNA
atgcgtgctaatcatacttcg

SEQ ID NO: 44427 - DNA, 21 bp, synthetic construct
  misc_feature 1..21: note = Description of Artificial Sequence: Synthetic oligonucleotide
  source 1..21: mol_type = other DNA
gatgttgcgattcagcctagg

SEQ ID NO: 44428 - DNA, 21 bp, synthetic construct
  misc_feature 1..21: note = Description of Artificial Sequence: Synthetic oligonucleotide
  source 1..21: mol_type = other DNA
ttccccagcaacggcagaacc

SEQ ID NO: 44429 - DNA, 21 bp, synthetic construct
  misc_feature 1..21: note = Description of Artificial Sequence: Synthetic oligonucleotide
  source 1..21: mol_type = other DNA
agcgacagcagaagcagaagc

SEQ ID NO: 44430 - DNA, 21 bp, synthetic construct
  misc_feature 1..21: note = Description of Artificial Sequence: Synthetic oligonucleotide
  source 1..21: mol_type = other DNA
ctcatgcaaacccacggcagc

SEQ ID NO: 44431 - DNA, 21 bp, synthetic construct
  misc_feature 1..21: note = Description of Artificial Sequence: Synthetic oligonucleotide
  source 1..21: mol_type = other DNA
atccaaagcagcgacagactc

SEQ ID NO: 44432 - DNA, 21 bp, synthetic construct
  misc_feature 1..21: note = Description of Artificial Sequence: Synthetic oligonucleotide
  source 1..21: mol_type = other DNA
attcctgcgaattcttttaag

SEQ ID NO: 44433 - DNA, 21 bp, synthetic construct
  misc_feature 1..21: note = Description of Artificial Sequence: Synthetic oligonucleotide
  source 1..21: mol_type = other DNA
tctatgtcgccgcgtaatggt

SEQ ID NO: 44434 - DNA, 21 bp, synthetic construct
  misc_feature 1..21: note = Description of Artificial Sequence: Synthetic oligonucleotide
  source 1..21: mol_type = other DNA
gggacttttagtactcagagt

SEQ ID NO: 44435 - DNA, 21 bp, synthetic construct
  misc_feature 1..21: note = Description of Artificial Sequence: Synthetic oligonucleotide
  source 1..21: mol_type = other DNA
tctgcgagtccgagtattaag

SEQ ID NO: 44436 - DNA, 21 bp, synthetic construct
  misc_feature 1..21: note = Description of Artificial Sequence: Synthetic oligonucleotide
  source 1..21: mol_type = other DNA
tatgcttctagtagggatggt

SEQ ID NO: 44437 - DNA, 21 bp, synthetic construct
  misc_feature 1..21: note = Description of Artificial Sequence: Synthetic oligonucleotide
  source 1..21: mol_type = other DNA
agaatgaaaagcctcgacaac

SEQ ID NO: 44438 - DNA, 21 bp, synthetic construct
  misc_feature 1..21: note = Description of Artificial Sequence: Synthetic oligonucleotide
  source 1..21: mol_type = other DNA
cccgccgaccacggcaaactc

SEQ ID NO: 44439 - DNA, 21 bp, synthetic construct
  misc_feature 1..21: note = Description of Artificial Sequence: Synthetic oligonucleotide
  source 1..21: mol_type = other DNA
gtcagcgacagcaacaccaaa

SEQ ID NO: 44440 - DNA, 21 bp, synthetic construct
  misc_feature 1..21: note = Description of Artificial Sequence: Synthetic oligonucleotide
  source 1..21: mol_type = other DNA
aagttggggcaggatgtgcgg

SEQ ID NO: 44441 - DNA, 21 bp, synthetic construct
  misc_feature 1..21: note = Description of Artificial Sequence: Synthetic oligonucleotide
  source 1..21: mol_type = other DNA
gtcggcgacagaagctggagc

SEQ ID NO: 44442 - DNA, 21 bp, synthetic construct
  misc_feature 1..21: note = Description of Artificial Sequence: Synthetic oligonucleotide
  source 1..21: mol_type = other DNA
cgtaatggtgctatgtctaat

SEQ ID NO: 44443 - DNA, 21 bp, synthetic construct
  misc_feature 1..21: note = Description of Artificial Sequence: Synthetic oligonucleotide
  source 1..21: mol_type = other DNA
tctaagccggctaataatgtt

SEQ ID NO: 44444 - DNA, 21 bp, synthetic construct
  misc_feature 1..21: note = Description of Artificial Sequence: Synthetic oligonucleotide
  source 1..21: mol_type = other DNA
agaggcgccgccgacagcaac

SEQ ID NO: 44445 - DNA, 21 bp, synthetic construct
  misc_feature 1..21: note = Description of Artificial Sequence: Synthetic oligonucleotide
  source 1..21: mol_type = other DNA
gcgcttcctgggagtactagt

SEQ ID NO: 44446 - DNA, 21 bp, synthetic construct
  misc_feature 1..21: note = Description of Artificial Sequence: Synthetic oligonucleotide
  source 1..21: mol_type = other DNA
cacgtccaagacggcagaacc

SEQ ID NO: 44447 - DNA, 21 bp, synthetic construct
  misc_feature 1..21: note = Description of Artificial Sequence: Synthetic oligonucleotide
  source 1..21: mol_type = other DNA
aacggcagcggccaagaccaa

SEQ ID NO: 44448 - DNA, 21 bp, synthetic construct
  misc_feature 1..21: note = Description of Artificial Sequence: Synthetic oligonucleotide
  source 1..21: mol_type = other DNA
aatattcatttggctggtact

SEQ ID NO: 44449 - DNA, 21 bp, synthetic construct
  misc_feature 1..21: note = Description of Artificial Sequence: Synthetic oligonucleotide
  source 1..21: mol_type = other DNA
catggtgagtctcggcaggcg

SEQ ID NO: 44450 - DNA, 21 bp, synthetic construct
  misc_feature 1..21: note = Description of Artificial Sequence: Synthetic oligonucleotide
  source 1..21: mol_type = other DNA
gaaagaggcaaaaacgccctc

SEQ ID NO: 44451 - DNA, 21 bp, synthetic construct
  misc_feature 1..21: note = Description of Artificial Sequence: Synthetic oligonucleotide
  source 1..21: mol_type = other DNA
ggcatccaaagcagccccacc

SEQ ID NO: 44452 - DNA, 21 bp, synthetic construct
  misc_feature 1..21: note = Description of Artificial Sequence: Synthetic oligonucleotide
  source 1..21: mol_type = other DNA
gtgggtagtcagactaatagt

SEQ ID NO: 44453 - DNA, 21 bp, synthetic construct
  misc_feature 1..21: note = Description of Artificial Sequence: Synthetic oligonucleotide
  source 1..21: mol_type = other DNA
gacacccacgtcagcggcaga

SEQ ID NO: 44454 - DNA, 21 bp, synthetic construct
  misc_feature 1..21: note = Description of Artificial Sequence: Synthetic oligonucleotide
  source 1..21: mol_type = other DNA
agcagcaccaaaagcagcctc

SEQ ID NO: 44455 - DNA, 21 bp, synthetic construct
  misc_feature 1..21: note = Description of Artificial Sequence: Synthetic oligonucleotide
  source 1..21: mol_type = other DNA
ggccaaatcaaaaacctcggc

SEQ ID NO: 44456 - DNA, 21 bp, synthetic construct
  misc_feature 1..21: note = Description of Artificial Sequence: Synthetic oligonucleotide
  source 1..21: mol_type = other DNA
aaaagcgacgcccacaccgcc

SEQ ID NO: 44457 - DNA, 21 bp, synthetic construct
  misc_feature 1..21: note = Description of Artificial Sequence: Synthetic oligonucleotide
  source 1..21: mol_type = other DNA
gggcaggtgaaggctattggg

SEQ ID NO: 44458 - DNA, 21 bp, synthetic construct
  misc_feature 1..21: note = Description of Artificial Sequence: Synthetic oligonucleotide
  source 1..21: mol_type = other DNA
gaaagcgccacccccatcaga

SEQ ID NO: 44459 - DNA, 21 bp, synthetic construct
  misc_feature 1..21: note = Description of Artificial Sequence: Synthetic oligonucleotide
  source 1..21: mol_type = other DNA
aacaacacccaaaaaaacagc

SEQ ID NO: 44460 - DNA, 21 bp, synthetic construct
  misc_feature 1..21: note = Description of Artificial Sequence: Synthetic oligonucleotide
  source 1..21: mol_type = other DNA
agccccggcaaactcaccacc

SEQ ID NO: 44461 - DNA, 21 bp, synthetic construct
  misc_feature 1..21: note = Description of Artificial Sequence: Synthetic oligonucleotide
  source 1..21: mol_type = other DNA
ctcaccaccggcaaccacatc

SEQ ID NO: 44462 - DNA, 21 bp, synthetic construct
  misc_feature 1..21: note = Description of Artificial Sequence: Synthetic oligonucleotide
  source 1..21: mol_type = other DNA
gacgacagaagcgccagaggc

SEQ ID NO: 44463 - DNA, 21 bp, synthetic construct
  misc_feature 1..21: note = Description of Artificial Sequence: Synthetic oligonucleotide
  source 1..21: mol_type = other DNA
ttcagaacccaaagcgtcggc

SEQ ID NO: 44464 - DNA, 21 bp, synthetic construct
  misc_feature 1..21: note = Description of Artificial Sequence: Synthetic oligonucleotide
  source 1..21: mol_type = other DNA
agcgccggcaaccacgacatc

SEQ ID NO: 44465 - DNA, 21 bp, synthetic construct
  misc_feature 1..21: note = Description of Artificial Sequence: Synthetic oligonucleotide
  source 1..21: mol_type = other DNA
aaccccggcgaaagccacaga

SEQ ID NO: 44466 - DNA, 21 bp, synthetic construct
  misc_feature 1..21: note = Description of Artificial Sequence: Synthetic oligonucleotide
  source 1..21: mol_type = other DNA
ggcaccagcaacagatacacc

SEQ ID NO: 44467 - DNA, 21 bp, synthetic construct
  misc_feature 1..21: note = Description of Artificial Sequence: Synthetic oligonucleotide
  source 1..21: mol_type = other DNA
caagacgccacccccagaagc

SEQ ID NO: 44468 - DNA, 21 bp, synthetic construct
  misc_feature 1..21: note = Description of Artificial Sequence: Synthetic oligonucleotide
  source 1..21: mol_type = other DNA
cagatgcctggtcatactggg

SEQ ID NO: 44469 - DNA, 21 bp, synthetic construct
  misc_feature 1..21: note = Description of Artificial Sequence: Synthetic oligonucleotide
  source 1..21: mol_type = other DNA
accaacagagtcggctacggc

SEQ ID NO: 44470 - DNA, 21 bp, synthetic construct
  misc_feature 1..21: note = Description of Artificial Sequence: Synthetic oligonucleotide
  source 1..21: mol_type = other DNA
caggtgacggctattggtgct

SEQ ID NO: 44471 - DNA, 21 bp, synthetic construct
  misc_feature 1..21: note = Description of Artificial Sequence: Synthetic oligonucleotide
  source 1..21: mol_type = other DNA
aatggtctgagtcagacgcat

SEQ ID NO: 44472 - DNA, 21 bp, synthetic construct
  misc_feature 1..21: note = Description of Artificial Sequence: Synthetic oligonucleotide
  source 1..21: mol_type = other DNA
aatgtggctactttgagtgct

SEQ ID NO: 44473 - DNA, 21 bp, synthetic construct
  misc_feature 1..21: note = Description of Artificial Sequence: Synthetic oligonucleotide
  source 1..21: mol_type = other DNA
ccttctactcggcagtctaat

SEQ ID NO: 44474 - DNA, 21 bp, synthetic construct
  misc_feature 1..21: note = Description of Artificial Sequence: Synthetic oligonucleotide
  source 1..21: mol_type = other DNA
tacagcggcggcaacatgagc

SEQ ID NO: 44475 - DNA, 21 bp, synthetic construct
  misc_feature 1..21: note = Description of Artificial Sequence: Synthetic oligonucleotide
  source 1..21: mol_type = other DNA
acccccatcacccccatgacc

SEQ ID NO: 44476 - DNA, 21 bp, synthetic construct
  misc_feature 1..21: note = Description of Artificial Sequence: Synthetic oligonucleotide
  source 1..21: mol_type = other DNA
agctacgccagcacccaacaa

SEQ ID NO: 44477 - DNA, 21 bp, synthetic construct
  misc_feature 1..21: note = Description of Artificial Sequence: Synthetic oligonucleotide
  source 1..21: mol_type = other DNA
accagcagaaccagctacgaa

SEQ ID NO: 44478 - DNA, 21 bp, synthetic construct
  misc_feature 1..21: note = Description of Artificial Sequence: Synthetic oligonucleotide
  source 1..21: mol_type = other DNA
cagggttcttcgcctatggag

SEQ ID NO: 44479 - DNA, 21 bp, synthetic construct
  misc_feature 1..21: note = Description of Artificial Sequence: Synthetic oligonucleotide
  source 1..21: mol_type = other DNA
cttaatcagattgggaagagt

SEQ ID NO: 44480 - DNA, 21 bp, synthetic construct
  misc_feature 1..21: note = Description of Artificial Sequence: Synthetic oligonucleotide
  source 1..21: mol_type = other DNA
actagtgagcgtccgacgtgt

SEQ ID NO: 44481 - DNA, 21 bp, synthetic construct
  misc_feature 1..21: note = Description of Artificial Sequence: Synthetic oligonucleotide
  source 1..21: mol_type = other DNA
gatatttcgaggtctcatggt

SEQ ID NO: 44482 - DNA, 21 bp, synthetic construct
  misc_feature 1..21: note = Description of Artificial Sequence: Synthetic oligonucleotide
  source 1..21: mol_type = other DNA
cggaataataatacgcctggg

SEQ ID NO: 44483 - DNA, 21 bp, synthetic construct
  misc_feature 1..21: note = Description of Artificial Sequence: Synthetic oligonucleotide
  source 1..21: mol_type = other DNA
cgtcagtatacgggtgatagt

SEQ ID NO: 44484 - DNA, 21 bp, synthetic construct
  misc_feature 1..21: note = Description of Artificial Sequence: Synthetic oligonucleotide
  source 1..21: mol_type = other DNA
gcccccaccagcgaccaccac

SEQ ID NO: 44485 - DNA, 21 bp, synthetic construct
  misc_feature 1..21: note = Description of Artificial Sequence: Synthetic oligonucleotide
  source 1..21: mol_type = other DNA
tgtttggcgcagccgagggtt

SEQ ID NO: 44486 - DNA, 21 bp, synthetic construct
  misc_feature 1..21: note = Description of Artificial Sequence: Synthetic oligonucleotide
  source 1..21: mol_type = other DNA
agttcgactagtcttggttcg

SEQ ID NO: 44487 - DNA, 21 bp, synthetic construct
  misc_feature 1..21: note = Description of Artificial Sequence: Synthetic oligonucleotide
  source 1..21: mol_type = other DNA
aagactcctcagctgtctcag

SEQ ID NO: 44488 - DNA, 21 bp, synthetic construct
  misc_feature 1..21: note = Description of Artificial Sequence: Synthetic oligonucleotide
  source 1..21: mol_type = other DNA
atgggtgttggtatgaatggt

SEQ ID NO: 44489 - DNA, 21 bp, synthetic construct
  misc_feature 1..21: note = Description of Artificial Sequence: Synthetic oligonucleotide
  source 1..21: mol_type = other DNA
agcgtcagcaacaccaacacc

SEQ ID NO: 44490 - DNA, 21 bp, synthetic construct
  misc_feature 1..21: note = Description of Artificial Sequence: Synthetic oligonucleotide
  source 1..21: mol_type = other DNA
catgttattgctcctcagcag

SEQ ID NO: 44491 - DNA, 21 bp, synthetic construct
  misc_feature 1..21: note = Description of Artificial Sequence: Synthetic oligonucleotide
  source 1..21: mol_type = other DNA
gggaatactaattcgtttctt

SEQ ID NO: 44492 - DNA, 21 bp, synthetic construct
  misc_feature 1..21: note = Description of Artificial Sequence: Synthetic oligonucleotide
  source 1..21: mol_type = other DNA
ggggctaagccgggtttggct

SEQ ID NO: 44493 - DNA, 21 bp, synthetic construct
  misc_feature 1..21: note = Description of Artificial Sequence: Synthetic oligonucleotide
  source 1..21: mol_type = other DNA
gtttctggtacgcctcgggtt

SEQ ID NO: 44494 - DNA, 21 bp, synthetic construct
  misc_feature 1..21: note = Description of Artificial Sequence: Synthetic oligonucleotide
  source 1..21: mol_type = other DNA
tcgtcttatgtggggccttcg

SEQ ID NO: 44495 - DNA, 21 bp, synthetic construct
  misc_feature 1..21: note = Description of Artificial Sequence: Synthetic oligonucleotide
  source 1..21: mol_type = other DNA
cttattcgtggtgggaataat

SEQ ID NO: 44496 - DNA, 21 bp, synthetic construct
  misc_feature 1..21: note = Description of Artificial Sequence: Synthetic oligonucleotide
  source 1..21: mol_type = other DNA
gacagcatcggcagcagcaaa

SEQ ID NO: 44497 - DNA, 21 bp, synthetic construct
  misc_feature 1..21: note = Description of Artificial Sequence: Synthetic oligonucleotide
  source 1..21: mol_type = other DNA
cggtttcagaataatactggg

SEQ ID NO: 44498 - DNA, 21 bp, synthetic construct
  misc_feature 1..21: note = Description of Artificial Sequence: Synthetic oligonucleotide
  source 1..21: mol_type = other DNA
accagcaacagcaacatcgcc

SEQ ID NO: 44499 - DNA, 21 bp, synthetic construct
  misc_feature 1..21: note = Description of Artificial Sequence: Synthetic oligonucleotide
  source 1..21: mol_type = other DNA
gggatgcatgtgagtaatcct

SEQ ID NO: 44500 - DNA, 21 bp, synthetic construct
  misc_feature 1..21: note = Description of Artificial Sequence: Synthetic oligonucleotide
  source 1..21: mol_type = other DNA
agtcttcctaatactaatggg

SEQ ID NO: 44501 - DNA, 21 bp, synthetic construct
  misc_feature 1..21: note = Description of Artificial Sequence: Synthetic oligonucleotide
  source 1..21: mol_type = other DNA
gatcctcgtaattctacgtct

SEQ ID NO: 44502 - DNA, 21 bp, synthetic construct
  misc_feature 1..21: note = Description of Artificial Sequence: Synthetic oligonucleotide
  source 1..21: mol_type = other DNA
agcggttctggacagaatcaa

SEQ ID NO: 44503 - DNA, 21 bp, synthetic construct
  misc_feature 1..21: note = Description of Artificial Sequence: Synthetic oligonucleotide
  source 1..21: mol_type = other DNA
tctacggatcggtcgtttaat

SEQ ID NO: 44504 - DNA, 21 bp, synthetic construct
  misc_feature 1..21: note = Description of Artificial Sequence: Synthetic oligonucleotide
  source 1..21: mol_type = other DNA
gagacgaattctcgtttgggt

SEQ ID NO: 44505 - DNA, 21 bp, synthetic construct
  misc_feature 1..21: note = Description of Artificial Sequence: Synthetic oligonucleotide
  source 1..21: mol_type = other DNA
gttcggcatacgacggatagt

SEQ ID NO: 44506 - DNA, 21 bp, synthetic construct
  misc_feature 1..21: note = Description of Artificial Sequence: Synthetic oligonucleotide
  source 1..21: mol_type = other DNA
actgctgtgacggcgaatcag

SEQ ID NO: 44507 - DNA, 21 bp, synthetic construct
  misc_feature 1..21: note = Description of Artificial Sequence: Synthetic oligonucleotide
  source 1..21: mol_type = other DNA
aacaaccccaaaaacgccgtc

SEQ ID NO: 44508 - DNA, 21 bp, synthetic construct
  misc_feature 1..21: note = Description of Artificial Sequence: Synthetic oligonucleotide
  source 1..21: mol_type = other DNA
cccctcagaatcggcacccaa

SEQ ID NO: 44509 - DNA, 21 bp, synthetic construct
  misc_feature 1..21: note = Description of Artificial Sequence: Synthetic oligonucleotide
  source 1..21: mol_type = other DNA
ccggcttcgcttggtcagggt

SEQ ID NO: 44510 - DNA, 21 bp, synthetic construct
  misc_feature 1..21: note = Description of Artificial Sequence: Synthetic oligonucleotide
  source 1..21: mol_type = other DNA
cataatagtggtaatggttcg

SEQ ID NO: 44511 - DNA, 21 bp, synthetic construct
  misc_feature 1..21: note = Description of Artificial Sequence: Synthetic oligonucleotide
  source 1..21: mol_type = other DNA
gcgacgcataattcgtctcag

SEQ ID NO: 44512 - DNA, 21 bp, synthetic construct
  misc_feature 1..21: note = Description of Artificial Sequence: Synthetic oligonucleotide
  source 1..21: mol_type = other DNA
ggttctcataatgatagtagg

SEQ ID NO: 44513 - DNA, 21 bp, synthetic construct
  misc_feature 1..21: note = Description of Artificial Sequence: Synthetic oligonucleotide
  source 1..21: mol_type = other DNA
gctttttctcattcttcgggt

SEQ ID NO: 44514 - DNA, 21 bp, synthetic construct
  misc_feature 1..21: note = Description of Artificial Sequence: Synthetic oligonucleotide
  source 1..21: mol_type = other DNA
attaatagtggtaatggttcg

SEQ ID NO: 44515 - DNA, 21 bp, synthetic construct
  misc_feature 1..21: note = Description of Artificial Sequence: Synthetic oligonucleotide
  source 1..21: mol_type = other DNA
agttcttcgcatgctactcgt

SEQ ID NO: 44516 - DNA, 21 bp, synthetic construct
  misc_feature 1..21: note = Description of Artificial Sequence: Synthetic oligonucleotide
  source 1..21: mol_type = other DNA
gccaccggcaacggcagaggc

SEQ ID NO: 44517 - DNA, 21 bp, synthetic construct
  misc_feature 1..21: note = Description of Artificial Sequence: Synthetic oligonucleotide
  source 1..21: mol_type = other DNA
ctcagagccggcaccgtcaga

SEQ ID NO: 44518 - DNA, 21 bp, synthetic construct
  misc_feature 1..21: note = Description of Artificial Sequence: Synthetic oligonucleotide
  source 1..21: mol_type = other DNA
agtaatggtcagaggaaggag

SEQ ID NO: 44519 - DNA, 21 bp, synthetic construct
  misc_feature 1..21: note = Description of Artificial Sequence: Synthetic oligonucleotide
  source 1..21: mol_type = other DNA
gctcctagtgcgggtatgtct

SEQ ID NO: 44520 - DNA, 21 bp, synthetic construct
  misc_feature 1..21: note = Description of Artificial Sequence: Synthetic oligonucleotide
  source 1..21: mol_type = other DNA
gacagaaaacacaccagcacc

SEQ ID NO: 44521 - DNA, 21 bp, synthetic construct
  misc_feature 1..21: note = Description of Artificial Sequence: Synthetic oligonucleotide
  source 1..21: mol_type = other DNA
ggcttccccgtcagcagcatg

SEQ ID NO: 44522 - DNA, 21 bp, synthetic construct
  misc_feature 1..21: note = Description of Artificial Sequence: Synthetic oligonucleotide
  source 1..21: mol_type = other DNA
acggtggctcatcctagtcat

SEQ ID NO: 44523 - DNA, 21 bp, synthetic construct
  misc_feature 1..21: note = Description of Artificial Sequence: Synthetic oligonucleotide
  source 1..21: mol_type = other DNA
cctcatacttctgggcgtccg

SEQ ID NO: 44524 - DNA, 21 bp, synthetic construct
  misc_feature 1..21: note = Description of Artificial Sequence: Synthetic oligonucleotide
  source 1..21: mol_type = other DNA
aacgtcagcagcgccatcaaa

SEQ ID NO: 44525 - DNA, 21 bp, synthetic construct
  misc_feature 1..21: note = Description of Artificial Sequence: Synthetic oligonucleotide
  source 1..21: mol_type = other DNA
cattatacggggaagcagaat

SEQ ID NO: 44526 - DNA, 21 bp, synthetic construct
  misc_feature 1..21: note = Description of Artificial Sequence: Synthetic oligonucleotide
  source 1..21: mol_type = other DNA
cacagcagccacagccccagc

SEQ ID NO: 44527 - DNA, 21 bp, synthetic construct
  misc_feature 1..21: note = Description of Artificial Sequence: Synthetic oligonucleotide
  source 1..21: mol_type = other DNA
acgttggagaatagtcgtcgt

SEQ ID NO: 44528 - DNA, 21 bp, synthetic construct
  misc_feature 1..21: note = Description of Artificial Sequence: Synthetic oligonucleotide
  source 1..21: mol_type = other DNA
agaggcaacgaaaacatcaac

SEQ ID NO: 44529 - DNA, 21 bp, synthetic construct
  misc_feature 1..21: note = Description of Artificial Sequence: Synthetic oligonucleotide
  source 1..21: mol_type = other DNA
ggtcagactagggagtctagt

SEQ ID NO: 44530 - DNA, 21 bp, synthetic construct
  misc_feature 1..21: note = Description of Artificial Sequence: Synthetic oligonucleotide
  source 1..21: mol_type = other DNA
aacggcaacatcagcatcggc

SEQ ID NO: 44531 - DNA, 21 bp, synthetic construct
  misc_feature 1..21: note = Description of Artificial Sequence: Synthetic oligonucleotide
  source 1..21: mol_type = other DNA
cccagcagcaaccacgtcaaa

SEQ ID NO: 44532 - DNA, 21 bp, synthetic construct
  misc_feature 1..21: note = Description of Artificial Sequence: Synthetic oligonucleotide
  source 1..21: mol_type = other DNA
ggcagactcaacaccaacggc

SEQ ID NO: 44533 - DNA, 21 bp, synthetic construct
  misc_feature 1..21: note = Description of Artificial Sequence: Synthetic oligonucleotide
  source 1..21: mol_type = other DNA
ccgacggcttcgaataggagt

SEQ ID NO: 44534 - DNA, 21 bp, synthetic construct
  misc_feature 1..21: note = Description of Artificial Sequence: Synthetic oligonucleotide
  source 1..21: mol_type = other DNA
tgcaccggcagcagaagcatg

SEQ ID NO: 44535 - DNA, 21 bp, synthetic construct
  misc_feature 1..21: note = Description of Artificial Sequence: Synthetic oligonucleotide
  source 1..21: mol_type = other DNA
accagcagcagccaacacgac

SEQ ID NO: 44536 - DNA, 21 bp, synthetic construct
  misc_feature 1..21: note = Description of Artificial Sequence: Synthetic oligonucleotide
  source 1..21: mol_type = other DNA
aggcttcctagtgtgtctagt

SEQ ID NO: 44537 - DNA, 21 bp, synthetic construct
  misc_feature 1..21: note = Description of Artificial Sequence: Synthetic oligonucleotide
  source 1..21: mol_type = other DNA
tacgccgacggcgccagaaac

SEQ ID NO: 44538 - DNA, 21 bp, synthetic construct
  misc_feature 1..21: note = Description of Artificial Sequence: Synthetic oligonucleotide
  source 1..21: mol_type = other DNA
cctttttctgagatgcagaag

SEQ ID NO: 44539 - DNA, 21 bp, synthetic construct
  misc_feature 1..21: note = Description of Artificial Sequence: Synthetic oligonucleotide
  source 1..21: mol_type = other DNA
ccggatgttaaggtgactagg

SEQ ID NO: 44540 - DNA, 21 bp, synthetic construct
  misc_feature 1..21: note = Description of Artificial Sequence: Synthetic oligonucleotide
  source 1..21: mol_type = other DNA
aacagcagcgacagcctcacc

SEQ ID NO: 44541 - DNA, 21 bp, synthetic construct
  misc_feature 1..21: note = Description of Artificial Sequence: Synthetic oligonucleotide
  source 1..21: mol_type = other DNA
atggctgctaagcctaatgat

SEQ ID NO: 44542 - DNA, 21 bp, synthetic construct
  misc_feature 1..21: note = Description of Artificial Sequence: Synthetic oligonucleotide
  source 1..21: mol_type = other DNA
catggtgatagtggtaaggtt

SEQ ID NO: 44543 - DNA, 21 bp, synthetic construct
  misc_feature 1..21: note = Description of Artificial Sequence: Synthetic oligonucleotide
  source 1..21: mol_type = other DNA
ggccccaacatcagcctcggc

SEQ ID NO: 44544 - DNA, 21 bp, synthetic construct
  misc_feature 1..21: note = Description of Artificial Sequence: Synthetic oligonucleotide
  source 1..21: mol_type = other DNA
gagagtgctcggattggttct

SEQ ID NO: 44545 - DNA, 21 bp, synthetic construct
  misc_feature 1..21: note = Description of Artificial Sequence: Synthetic oligonucleotide
  source 1..21: mol_type = other DNA
gggggtactccgactcatcgg

SEQ ID NO: 44546 - DNA, 21 bp, synthetic construct
  misc_feature 1..21: note = Description of Artificial Sequence: Synthetic oligonucleotide
  source 1..21: mol_type = other DNA
gccagaaaccccaccagcacc

SEQ ID NO: 44547 - DNA, 21 bp, synthetic construct
  misc_feature 1..21: note = Description of Artificial Sequence: Synthetic oligonucleotide
  source 1..21: mol_type = other DNA
aatacttcttcttctcatacg

SEQ ID NO: 44548 - DNA, 21 bp, synthetic construct
  misc_feature 1..21: note = Description of Artificial Sequence: Synthetic oligonucleotide
  source 1..21: mol_type = other DNA
agcagcggcaaaagcttcagc

SEQ ID NO: 44549 - DNA, 21 bp, synthetic construct
  misc_feature 1..21: note = Description of Artificial Sequence: Synthetic oligonucleotide
  source 1..21: mol_type = other DNA
tctatttctaagactcaggct

SEQ ID NO: 44550 - DNA, 21 bp, synthetic construct
  misc_feature 1..21: note = Description of Artificial Sequence: Synthetic oligonucleotide
  source 1..21: mol_type = other DNA
actcagtcttcgagtaggacg

SEQ ID NO: 44551 - DNA, 21 bp, synthetic construct
  misc_feature 1..21: note = Description of Artificial Sequence: Synthetic oligonucleotide
  source 1..21: mol_type = other DNA
cacaaaagcagcgccgtcggc

SEQ ID NO: 44552 - DNA, 21 bp, synthetic construct
  misc_feature 1..21: note = Description of Artificial Sequence: Synthetic oligonucleotide
  source 1..21: mol_type = other DNA
caagaaggcgtcagaagcagc

SEQ ID NO: 44553 - DNA, 21 bp, synthetic construct
  misc_feature 1..21: note = Description of Artificial Sequence: Synthetic oligonucleotide
  source 1..21: mol_type = other DNA
cccgtcagacccgccaacctc

SEQ ID NO: 44554 - DNA, 21 bp, synthetic construct
  misc_feature 1..21: note = Description of Artificial Sequence: Synthetic oligonucleotide
  source 1..21: mol_type = other DNA
tctgtgggtgctcctactctt

SEQ ID NO: 44555 - DNA, 21 bp, synthetic construct
  misc_feature 1..21: note = Description of Artificial Sequence: Synthetic oligonucleotide
  source 1..21: mol_type = other DNA
gcgggttctcagactggtgtt

SEQ ID NO: 44556 - DNA, 21 bp, synthetic construct
  misc_feature 1..21: note = Description of Artificial Sequence: Synthetic oligonucleotide
  source 1..21: mol_type = other DNA
tttgggactaataaggtggat

SEQ ID NO: 44557 - DNA, 21 bp, synthetic construct
  misc_feature 1..21: note = Description of Artificial Sequence: Synthetic oligonucleotide
  source 1..21: mol_type = other DNA
agaggcgacccccacagagcc

SEQ ID NO: 44558 - DNA, 21 bp, synthetic construct
  misc_feature 1..21: note = Description of Artificial Sequence: Synthetic oligonucleotide
  source 1..21: mol_type = other DNA
ggcaacagacccaccaccctc

SEQ ID NO: 44559 - DNA, 21 bp, synthetic construct
  misc_feature 1..21: note = Description of Artificial Sequence: Synthetic oligonucleotide
  source 1..21: mol_type = other DNA
actatgaggccttctagtgat

SEQ ID NO: 44560 - DNA, 21 bp, synthetic construct
  misc_feature 1..21: note = Description of Artificial Sequence: Synthetic oligonucleotide
  source 1..21: mol_type = other DNA
tatggtcgtgataagtttagt

SEQ ID NO: 44561 - DNA, 21 bp, synthetic construct
  misc_feature 1..21: note = Description of Artificial Sequence: Synthetic oligonucleotide
  source 1..21: mol_type = other DNA
cagactcgtagtaatggtaat

SEQ ID NO: 44562 - DNA, 21 bp, synthetic construct
  misc_feature 1..21: note = Description of Artificial Sequence: Synthetic oligonucleotide
  source 1..21: mol_type = other DNA
agccccgccagcctccccaaa

SEQ ID NO: 44563 - DNA, 21 bp, synthetic construct
  misc_feature 1..21: note = Description of Artificial Sequence: Synthetic oligonucleotide
  source 1..21: mol_type = other DNA
tctgaggttaatcgtgggacg

SEQ ID NO: 44564 - DNA, 21 bp, synthetic construct
  misc_feature 1..21: note = Description of Artificial Sequence: Synthetic oligonucleotide
  source 1..21: mol_type = other DNA
ggcagagccaacggccaaacc

SEQ ID NO: 44565 - DNA, 21 bp, synthetic construct
  misc_feature 1..21: note = Description of Artificial Sequence: Synthetic oligonucleotide
  source 1..21: mol_type = other DNA
aatagttatgatccgaagcgt

SEQ ID NO: 44566 - DNA, 21 bp, synthetic construct
  misc_feature 1..21: note = Description of Artificial Sequence: Synthetic oligonucleotide
  source 1..21: mol_type = other DNA
tttacggttactgggctgagt

SEQ ID NO: 44567 - DNA, 21 bp, synthetic construct
  misc_feature 1..21: note = Description of Artificial Sequence: Synthetic oligonucleotide
  source 1..21: mol_type = other DNA
aaagccgacgccaccagaacc

SEQ ID NO: 44568 - DNA, 21 bp, synthetic construct
  misc_feature 1..21: note = Description of Artificial Sequence: Synthetic oligonucleotide
  source 1..21: mol_type = other DNA
cagatgaatcatctgcaggtt

SEQ ID NO: 44569 - DNA, 21 bp, synthetic construct
  misc_feature 1..21: note = Description of Artificial Sequence: Synthetic oligonucleotide
  source 1..21: mol_type = other DNA
accagcggcagcgccagaggc

SEQ ID NO: 44570 - DNA, 21 bp, synthetic construct
  misc_feature 1..21: note = Description of Artificial Sequence: Synthetic oligonucleotide
  source 1..21: mol_type = other DNA
actggtactcaggggactagg

SEQ ID NO: 44571 - DNA, 21 bp, synthetic construct
  misc_feature 1..21: note = Description of Artificial Sequence: Synthetic oligonucleotide
  source 1..21: mol_type = other DNA
ggcctcgaaagcatgagacaa

SEQ ID NO: 44572 - DNA, 21 bp, synthetic construct
  misc_feature 1..21: note = Description of Artificial Sequence: Synthetic oligonucleotide
  source 1..21: mol_type = other DNA
cccggcaccaccagcgccatg

SEQ ID NO: 44573 - DNA, 21 bp, synthetic construct
  misc_feature 1..21: note = Description of Artificial Sequence: Synthetic oligonucleotide
  source 1..21: mol_type = other DNA
agaaccgaccacggcggcgtc

SEQ ID NO: 44574 - DNA, 21 bp, synthetic construct
  misc_feature 1..21: note = Description of Artificial Sequence: Synthetic oligonucleotide
  source 1..21: mol_type = other DNA
gacagagtcggcagcatcagc

SEQ ID NO: 44575 - DNA, 21 bp, synthetic construct
  misc_feature 1..21: note = Description of Artificial Sequence: Synthetic oligonucleotide
  source 1..21: mol_type = other DNA
gactaccacaacagcaaactc

SEQ ID NO: 44576 - DNA, 21 bp, synthetic construct
  misc_feature 1..21: note = Description of Artificial Sequence: Synthetic oligonucleotide
  source 1..21: mol_type = other DNA
acgccgacgactagtgcgaat

SEQ ID NO: 44577 - DNA, 21 bp, synthetic construct
  misc_feature 1..21: note = Description of Artificial Sequence: Synthetic oligonucleotide
  source 1..21: mol_type = other DNA
caacccatcaacgtccacaac

SEQ ID NO: 44578 - DNA, 21 bp, synthetic construct
  misc_feature 1..21: note = Description of Artificial Sequence: Synthetic oligonucleotide
  source 1..21: mol_type = other DNA
cacggcatcggcaacagcgcc

SEQ ID NO: 44579 - DNA, 21 bp, synthetic construct
  misc_feature 1..21: note = Description of Artificial Sequence: Synthetic oligonucleotide
  source 1..21: mol_type = other DNA
ggcagaaccaacagctacagc

SEQ ID NO: 44580 - DNA, 21 bp, synthetic construct
  misc_feature 1..21: note = Description of Artificial Sequence: Synthetic oligonucleotide
  source 1..21: mol_type = other DNA
actgatacttctaggaggcag

SEQ ID NO: 44581 - DNA, 21 bp, synthetic construct
  misc_feature 1..21: note = Description of Artificial Sequence: Synthetic oligonucleotide
  source 1..21: mol_type = other DNA
ctgaggaatagtacgagtgtg

SEQ ID NO: 44582 - DNA, 21 bp, synthetic construct
  misc_feature 1..21: note = Description of Artificial Sequence: Synthetic oligonucleotide
  source 1..21: mol_type = other DNA
accagagaaagcagaaccaac

SEQ ID NO: 44583 - DNA, 21 bp, synthetic construct
  misc_feature 1..21: note = Description of Artificial Sequence: Synthetic oligonucleotide
  source 1..21: mol_type = other DNA
ggcaacggcatcagcaccaaa

SEQ ID NO: 44584 - DNA, 21 bp, synthetic construct
  misc_feature 1..21: note = Description of Artificial Sequence: Synthetic oligonucleotide
  source 1..21: mol_type = other DNA
gaaagacacgtccccagcagc

SEQ ID NO: 44585 - DNA, 21 bp, synthetic construct
  misc_feature 1..21: note = Description of Artificial Sequence: Synthetic oligonucleotide
  source 1..21: mol_type = other DNA
tttgctcgtagtgctagttct

SEQ ID NO: 44586 - DNA, 21 bp, synthetic construct
  misc_feature 1..21: note = Description of Artificial Sequence: Synthetic oligonucleotide
  source 1..21: mol_type = other DNA
ccgatggctcagcagcgggct

SEQ ID NO: 44587 - DNA, 21 bp, synthetic construct
  misc_feature 1..21: note = Description of Artificial Sequence: Synthetic oligonucleotide
  source 1..21: mol_type = other DNA
gacagagtcctcagccaaggc

SEQ ID NO: 44588 - DNA, 21 bp, synthetic construct
  misc_feature 1..21: note = Description of Artificial Sequence: Synthetic oligonucleotide
  source 1..21: mol_type = other DNA
aattcggcgagtctgaatcat

SEQ ID NO: 44589 - DNA, 21 bp, synthetic construct
  misc_feature 1..21: note = Description of Artificial Sequence: Synthetic oligonucleotide
  source 1..21: mol_type = other DNA
catcgggtggagggttcgctt

SEQ ID NO: 44590 - DNA, 21 bp, synthetic construct
  misc_feature 1..21: note = Description of Artificial Sequence: Synthetic oligonucleotide
  source 1..21: mol_type = other DNA
tcgaaggctacgcataatatt

SEQ ID NO: 44591 - DNA, 21 bp, synthetic construct
  misc_feature 1..21: note = Description of Artificial Sequence: Synthetic oligonucleotide
  source 1..21: mol_type = other DNA
ctttcgcttaataagtctcag

SEQ ID NO: 44592 - DNA, 21 bp, synthetic construct
  misc_feature 1..21: note = Description of Artificial Sequence: Synthetic oligonucleotide
  source 1..21: mol_type = other DNA
agagaccccaaaagcagcacc

SEQ ID NO: 44593 - DNA, 21 bp, synthetic construct
  misc_feature 1..21: note = Description of Artificial Sequence: Synthetic oligonucleotide
  source 1..21: mol_type = other DNA
acgtctgcggctccgcatgcg

SEQ ID NO: 44594 - DNA, 21 bp, synthetic construct
  misc_feature 1..21: note = Description of Artificial Sequence: Synthetic oligonucleotide
  source 1..21: mol_type = other DNA
cccaccatcagcgtcgacaga

SEQ ID NO: 44595 - DNA, 21 bp, synthetic construct
  misc_feature 1..21: note = Description of Artificial Sequence: Synthetic oligonucleotide
  source 1..21: mol_type = other DNA
cacagcagcaaaagccacgac

SEQ ID NO: 44596 - DNA, 21 bp, synthetic construct
  misc_feature 1..21: note = Description of Artificial Sequence: Synthetic oligonucleotide
  source 1..21: mol_type = other DNA
atggggattcgtgataatact

SEQ ID NO: 44597 - DNA, 21 bp, synthetic construct
  misc_feature 1..21: note = Description of Artificial Sequence: Synthetic oligonucleotide
  source 1..21: mol_type = other DNA
aggtcgtcgaattctgatcat

SEQ ID NO: 44598 - DNA, 21 bp, synthetic construct
  misc_feature 1..21: note = Description of Artificial Sequence: Synthetic oligonucleotide
  source 1..21: mol_type = other DNA
gatgtgcataggagtagtggg

SEQ ID NO: 44599 - DNA, 21 bp, synthetic construct
  misc_feature 1..21: note = Description of Artificial Sequence: Synthetic oligonucleotide
  source 1..21: mol_type = other DNA
ctcagcgccgccagaagccaa

SEQ ID NO: 44600 - DNA, 21 bp, synthetic construct
  misc_feature 1..21: note = Description of Artificial Sequence: Synthetic oligonucleotide
  source 1..21: mol_type = other DNA
cccagcaaaagcagcagcgcc

SEQ ID NO: 44601 - DNA, 21 bp, synthetic construct
  misc_feature 1..21: note = Description of Artificial Sequence: Synthetic oligonucleotide
  source 1..21: mol_type = other DNA
caaagcagccaaagcggcccc

SEQ ID NO: 44602 - DNA, 21 bp, synthetic construct
  misc_feature 1..21: note = Description of Artificial Sequence: Synthetic oligonucleotide
  source 1..21: mol_type = other DNA
ggtggtaataagcagggttgt

SEQ ID NO: 44603 - DNA, 21 bp, synthetic construct
  misc_feature 1..21: note = Description of Artificial Sequence: Synthetic oligonucleotide
  source 1..21: mol_type = other DNA
actcagcggcctgctcagatg

SEQ ID NO: 44604 - DNA, 21 bp, synthetic construct
  misc_feature 1..21: note = Description of Artificial Sequence: Synthetic oligonucleotide
  source 1..21: mol_type = other DNA
gcgggtactcgtcagtcttgt

SEQ ID NO: 44605 - DNA, 21 bp, synthetic construct
  misc_feature 1..21: note = Description of Artificial Sequence: Synthetic oligonucleotide
  source 1..21: mol_type = other DNA
gccaacaccagcggccaagcc

SEQ ID NO: 44606 - DNA, 21 bp, synthetic construct
  misc_feature 1..21: note = Description of Artificial Sequence: Synthetic oligonucleotide
  source 1..21: mol_type = other DNA
tctgtggggtctggtgctttg

SEQ ID NO: 44607 - DNA, 21 bp, synthetic construct
  misc_feature 1..21: note = Description of Artificial Sequence: Synthetic oligonucleotide
  source 1..21: mol_type = other DNA
gatgttaatactaaggcgctt

SEQ ID NO: 44608 - DNA, 21 bp, synthetic construct
  misc_feature 1..21: note = Description of Artificial Sequence: Synthetic oligonucleotide
  source 1..21: mol_type = other DNA
caaggcaaaaccgccccctac

SEQ ID NO: 44609 - DNA, 21 bp, synthetic construct
  misc_feature 1..21: note = Description of Artificial Sequence: Synthetic oligonucleotide
  source 1..21: mol_type = other DNA
attgcttcgagtggtatgcat

SEQ ID NO: 44610 - DNA, 21 bp, synthetic construct
  misc_feature 1..21: note = Description of Artificial Sequence: Synthetic oligonucleotide
  source 1..21: mol_type = other DNA
cccagcagaggcgtcgccatg

SEQ ID NO: 44611 - DNA, 21 bp, synthetic construct
  misc_feature 1..21: note = Description of Artificial Sequence: Synthetic oligonucleotide
  source 1..21: mol_type = other DNA
cgtcctgctacttccactccg

SEQ ID NO: 44612 - DNA, 21 bp, synthetic construct
  misc_feature 1..21: note = Description of Artificial Sequence: Synthetic oligonucleotide
  source 1..21: mol_type = other DNA
ccgattggttctcagcatatt

SEQ ID NO: 44613 - DNA, 21 bp, synthetic construct
  misc_feature 1..21: note = Description of Artificial Sequence: Synthetic oligonucleotide
  source 1..21: mol_type = other DNA
gctagttctaagggtttgact

SEQ ID NO: 44614 - DNA, 21 bp, synthetic construct
  misc_feature 1..21: note = Description of Artificial Sequence: Synthetic oligonucleotide
  source 1..21: mol_type = other DNA
tatcagcctgagcggtcttct

SEQ ID NO: 44615 - DNA, 21 bp, synthetic construct
  misc_feature 1..21: note = Description of Artificial Sequence: Synthetic oligonucleotide
  source 1..21: mol_type = other DNA
cattatggtccggattcgaag

SEQ ID NO: 44616 - DNA, 21 bp, synthetic construct
  misc_feature 1..21: note = Description of Artificial Sequence: Synthetic oligonucleotide
  source 1..21: mol_type = other DNA
ccgagtaataaggctgggact

SEQ ID NO: 44617 - DNA, 21 bp, synthetic construct
  misc_feature 1..21: note = Description of Artificial Sequence: Synthetic oligonucleotide
  source 1..21: mol_type = other DNA
cgggtggcgacttcggtgtcg

SEQ ID NO: 44618 - DNA, 21 bp, synthetic construct
  misc_feature 1..21: note = Description of Artificial Sequence: Synthetic oligonucleotide
  source 1..21: mol_type = other DNA
cagtcgagtaatgctcggaat

SEQ ID NO: 44619 - DNA, 21 bp, synthetic construct
  misc_feature 1..21: note = Description of Artificial Sequence: Synthetic oligonucleotide
  source 1..21: mol_type = other DNA
ggggatatggggatttcgaag

SEQ ID NO: 44620 - DNA, 21 bp, synthetic construct
  misc_feature 1..21: note = Description of Artificial Sequence: Synthetic oligonucleotide
  source 1..21: mol_type = other DNA
agcagcatcagcagaaccagc

SEQ ID NO: 44621 - DNA, 21 bp, synthetic construct
  misc_feature 1..21: note = Description of Artificial Sequence: Synthetic oligonucleotide
  source 1..21: mol_type = other DNA
catcttggggttccgctgaag

SEQ ID NO: 44622 - DNA, 21 bp, synthetic construct
  misc_feature 1..21: note = Description of Artificial Sequence: Synthetic oligonucleotide
  source 1..21: mol_type = other DNA
ccgaatgggggtattcctcct

SEQ ID NO: 44623 - DNA, 21 bp, synthetic construct
  misc_feature 1..21: note = Description of Artificial Sequence: Synthetic oligonucleotide
  source 1..21: mol_type = other DNA
gctaatccggttaggcctgag

SEQ ID NO: 44624 - DNA, 21 bp, synthetic construct
  misc_feature 1..21: note = Description of Artificial Sequence: Synthetic oligonucleotide
  source 1..21: mol_type = other DNA
tcggtgcagggggagcggatg

SEQ ID NO: 44625 - DNA, 21 bp, synthetic construct
  misc_feature 1..21: note = Description of Artificial Sequence: Synthetic oligonucleotide
  source 1..21: mol_type = other DNA
tatcagcatccgaagatggct

SEQ ID NO: 44626 - DNA, 21 bp, synthetic construct
  misc_feature 1..21: note = Description of Artificial Sequence: Synthetic oligonucleotide
  source 1..21: mol_type = other DNA
actcctacgttggctcatggt

SEQ ID NO: 44627 - DNA, 21 bp, synthetic construct
  misc_feature 1..21: note = Description of Artificial Sequence: Synthetic oligonucleotide
  source 1..21: mol_type = other DNA
caacccaacaccacctacaga

SEQ ID NO: 44628 - DNA, 21 bp, synthetic construct
  misc_feature 1..21: note = Description of Artificial Sequence: Synthetic oligonucleotide
  source 1..21: mol_type = other DNA
aataatgctcatagttcgtct

SEQ ID NO: 44629 - DNA, 21 bp, synthetic construct
  misc_feature 1..21: note = Description of Artificial Sequence: Synthetic oligonucleotide
  source 1..21: mol_type = other DNA
catgctaataatgggacgtct

SEQ ID NO: 44630 - DNA, 21 bp, synthetic construct
  misc_feature 1..21: note = Description of Artificial Sequence: Synthetic oligonucleotide
  source 1..21: mol_type = other DNA
ccgactggggcgcatgttacg

SEQ ID NO: 44631 - DNA, 21 bp, synthetic construct
  misc_feature 1..21: note = Description of Artificial Sequence: Synthetic oligonucleotide
  source 1..21: mol_type = other DNA
ggcatgaaaggcagcgtcaac

SEQ ID NO: 44632 - DNA, 21 bp, synthetic construct
  misc_feature 1..21: note = Description of Artificial Sequence: Synthetic oligonucleotide
  source 1..21: mol_type = other DNA
attagttctggtacgcatggg

SEQ ID NO: 44633 - DNA, 21 bp, synthetic construct
  misc_feature 1..21: note = Description of Artificial Sequence: Synthetic oligonucleotide
  source 1..21: mol_type = other DNA
tcgcagtctcagactccggag

SEQ ID NO: 44634 - DNA, 21 bp, synthetic construct
  misc_feature 1..21: note = Description of Artificial Sequence: Synthetic oligonucleotide
  source 1..21: mol_type = other DNA
aggagtatgtctagtgcggtg

SEQ ID NO: 44635 - DNA, 21 bp, synthetic construct
  misc_feature 1..21: note = Description of Artificial Sequence: Synthetic oligonucleotide
  source 1..21: mol_type = other DNA
cttaggaatggtattgcttct

SEQ ID NO: 44636 - DNA, 21 bp, synthetic construct
  misc_feature 1..21: note = Description of Artificial Sequence: Synthetic oligonucleotide
  source 1..21: mol_type = other DNA
ctccccagcaacagcatccac

SEQ ID NO: 44637 - DNA, 21 bp, synthetic construct
  misc_feature 1..21: note = Description of Artificial Sequence: Synthetic oligonucleotide
  source 1..21: mol_type = other DNA
ccccacgtcatgggcaaacac

SEQ ID NO: 44638 - DNA, 21 bp, synthetic construct
  misc_feature 1..21: note = Description of Artificial Sequence: Synthetic oligonucleotide
  source 1..21: mol_type = other DNA
aatcgggttactcagagtagt

SEQ ID NO: 44639 - DNA, 21 bp, synthetic construct
  misc_feature 1..21: note = Description of Artificial Sequence: Synthetic oligonucleotide
  source 1..21: mol_type = other DNA
agcaaaagcacccaccaagcc

SEQ ID NO: 44640 - DNA, 21 bp, synthetic construct
  misc_feature 1..21: note = Description of Artificial Sequence: Synthetic oligonucleotide
  source 1..21: mol_type = other DNA
ttgcgtcctgctaatactatt

SEQ ID NO: 44641 - DNA, 21 bp, synthetic construct
  misc_feature 1..21: note = Description of Artificial Sequence: Synthetic oligonucleotide
  source 1..21: mol_type = other DNA
ggtgttgaggcgatgcggaat

SEQ ID NO: 44642 - DNA, 21 bp, synthetic construct
  misc_feature 1..21: note = Description of Artificial Sequence: Synthetic oligonucleotide
  source 1..21: mol_type = other DNA
cagagtagtcatgaggggagg

SEQ ID NO: 44643 - DNA, 21 bp, synthetic construct
  misc_feature 1..21: note = Description of Artificial Sequence: Synthetic oligonucleotide
  source 1..21: mol_type = other DNA
cccaaagtcagagacggctac

SEQ ID NO: 44644 - DNA, 21 bp, synthetic construct
  misc_feature 1..21: note = Description of Artificial Sequence: Synthetic oligonucleotide
  source 1..21: mol_type = other DNA
actcctgcggggccgaataag

SEQ ID NO: 44645 - DNA, 21 bp, synthetic construct
  misc_feature 1..21: note = Description of Artificial Sequence: Synthetic oligonucleotide
  source 1..21: mol_type = other DNA
aataatgtgggtgttcgtggt

SEQ ID NO: 44646 - DNA, 21 bp, synthetic construct
  misc_feature 1..21: note = Description of Artificial Sequence: Synthetic oligonucleotide
  source 1..21: mol_type = other DNA
agtaagactgggactagtttg

SEQ ID NO: 44647 - DNA, 21 bp, synthetic construct
  misc_feature 1..21: note = Description of Artificial Sequence: Synthetic oligonucleotide
  source 1..21: mol_type = other DNA
ccgacggttcggtcgtctacg

SEQ ID NO: 44648 - DNA, 21 bp, synthetic construct
  misc_feature 1..21: note = Description of Artificial Sequence: Synthetic oligonucleotide
  source 1..21: mol_type = other DNA
tcggtgcttaatcgtaatggg

SEQ ID NO: 44649 - DNA, 21 bp, synthetic construct
  misc_feature 1..21: note = Description of Artificial Sequence: Synthetic oligonucleotide
  source 1..21: mol_type = other DNA
tctggtagtgataagtttagt

SEQ ID NO: 44650 - DNA, 21 bp, synthetic construct
  misc_feature 1..21: note = Description of Artificial Sequence: Synthetic oligonucleotide
  source 1..21: mol_type = other DNA
attcgggattcgacgctgggt

SEQ ID NO: 44651 - DNA, 21 bp, synthetic construct
  misc_feature 1..21: note = Description of Artificial Sequence: Synthetic oligonucleotide
  source 1..21: mol_type = other DNA
ccgtcgtctcctacggatcgg

SEQ ID NO: 44652 - DNA, 21 bp, synthetic construct
  misc_feature 1..21: note = Description of Artificial Sequence: Synthetic oligonucleotide
  source 1..21: mol_type = other DNA
acggggcatcatcctccttct

SEQ ID NO: 44653 - DNA, 21 bp, synthetic construct
  misc_feature 1..21: note = Description of Artificial Sequence: Synthetic oligonucleotide
  source 1..21: mol_type = other DNA
aataatgctgctactcattcg

SEQ ID NO: 44654 - DNA, 21 bp, synthetic construct
  misc_feature 1..21: note = Description of Artificial Sequence: Synthetic oligonucleotide
  source 1..21: mol_type = other DNA
agaagcggcaacggcagcctc

SEQ ID NO: 44655 - DNA, 21 bp, synthetic construct
  misc_feature 1..21: note = Description of Artificial Sequence: Synthetic oligonucleotide
  source 1..21: mol_type = other DNA
cttgggacgtctcatcagcag

SEQ ID NO: 44656 - DNA, 21 bp, synthetic construct
  misc_feature 1..21: note = Description of Artificial Sequence: Synthetic oligonucleotide
  source 1..21: mol_type = other DNA
accaccgccagcagccccacc

SEQ ID NO: 44657 - DNA, 21 bp, synthetic construct
  misc_feature 1..21: note = Description of Artificial Sequence: Synthetic oligonucleotide
  source 1..21: mol_type = other DNA
tttcctctgactaagcctgct

SEQ ID NO: 44658 - DNA, 21 bp, synthetic construct
  misc_feature 1..21: note = Description of Artificial Sequence: Synthetic oligonucleotide
  source 1..21: mol_type = other DNA
ccgtctggggagactagtaag

SEQ ID NO: 44659 - DNA, 21 bp, synthetic construct
  misc_feature 1..21: note = Description of Artificial Sequence: Synthetic oligonucleotide
  source 1..21: mol_type = other DNA
ccggggctttctaattcgcgt

SEQ ID NO: 44660 - DNA, 21 bp, synthetic construct
  misc_feature 1..21: note = Description of Artificial Sequence: Synthetic oligonucleotide
  source 1..21: mol_type = other DNA
gatttgcagactagtgctaag

SEQ ID NO: 44661 - DNA, 21 bp, synthetic construct
  misc_feature 1..21: note = Description of Artificial Sequence: Synthetic oligonucleotide
  source 1..21: mol_type = other DNA
tcttctactagggcgctgtct

SEQ ID NO: 44662 - DNA, 21 bp, synthetic construct
  misc_feature 1..21: note = Description of Artificial Sequence: Synthetic oligonucleotide
  source 1..21: mol_type = other DNA
ggcatcaccgccaaactcacc

SEQ ID NO: 44663 - DNA, 21 bp, synthetic construct
  misc_feature 1..21: note = Description of Artificial Sequence: Synthetic oligonucleotide
  source 1..21: mol_type = other DNA
acgacttcgaataaggatagt

SEQ ID NO: 44664 - DNA, 21 bp, synthetic construct
  misc_feature 1..21: note = Description of Artificial Sequence: Synthetic oligonucleotide
  source 1..21: mol_type = other DNA
ccgagtagtccgaattctatt

SEQ ID NO: 44665 - DNA, 21 bp, synthetic construct
  misc_feature 1..21: note = Description of Artificial Sequence: Synthetic oligonucleotide
  source 1..21: mol_type = other DNA
ggcagacacggcgcccccacc

SEQ ID NO: 44666 - DNA, 21 bp, synthetic construct
  misc_feature 1..21: note = Description of Artificial Sequence: Synthetic oligonucleotide
  source 1..21: mol_type = other DNA
cctggtatgaaggtgagtccg

SEQ ID NO: 44667 - DNA, 21 bp, synthetic construct
  misc_feature 1..21: note = Description of Artificial Sequence: Synthetic oligonucleotide
  source 1..21: mol_type = other DNA
aatgcggttcgttctgagaat

SEQ ID NO: 44668 - DNA, 21 bp, synthetic construct
  misc_feature 1..21: note = Description of Artificial Sequence: Synthetic oligonucleotide
  source 1..21: mol_type = other DNA
gtcgtccccgaaagaagcaaa

SEQ ID NO: 44669 - DNA, 21 bp, synthetic construct
  misc_feature 1..21: note = Description of Artificial Sequence: Synthetic oligonucleotide
  source 1..21: mol_type = other DNA
gacagcagaagcatcaaaggc

SEQ ID NO: 44670 - DNA, 21 bp, synthetic construct
  misc_feature 1..21: note = Description of Artificial Sequence: Synthetic oligonucleotide
  source 1..21: mol_type = other DNA
cagaggacttcggatcagact

SEQ ID NO: 44671 - DNA, 21 bp, synthetic construct
  misc_feature 1..21: note = Description of Artificial Sequence: Synthetic oligonucleotide
  source 1..21: mol_type = other DNA
aacaacagcagagtcctcggc

SEQ ID NO: 44672 - DNA, 21 bp, synthetic construct
  misc_feature 1..21: note = Description of Artificial Sequence: Synthetic oligonucleotide
  source 1..21: mol_type = other DNA
ctcagacccaacggccaactc

SEQ ID NO: 44673 - DNA, 21 bp, synthetic construct
  misc_feature 1..21: note = Description of Artificial Sequence: Synthetic oligonucleotide
  source 1..21: mol_type = other DNA
gagaataatagtcgtgctact

SEQ ID NO: 44674 - DNA, 21 bp, synthetic construct
  misc_feature 1..21: note = Description of Artificial Sequence: Synthetic oligonucleotide
  source 1..21: mol_type = other DNA
tgtgtgactggtggtcttact

SEQ ID NO: 44675 - DNA, 21 bp, synthetic construct
  misc_feature 1..21: note = Description of Artificial Sequence: Synthetic oligonucleotide
  source 1..21: mol_type = other DNA
cctgctaattcgcctgcgacg

SEQ ID NO: 44676 - DNA, 21 bp, synthetic construct
  misc_feature 1..21: note = Description of Artificial Sequence: Synthetic oligonucleotide
  source 1..21: mol_type = other DNA
gttagttttaagcctaatgag

SEQ ID NO: 44677 - DNA, 21 bp, synthetic construct
  misc_feature 1..21: note = Description of Artificial Sequence: Synthetic oligonucleotide
  source 1..21: mol_type = other DNA
atgagaagcaaagaaagcgcc

SEQ ID NO: 44678 - DNA, 21 bp, synthetic construct
  misc_feature 1..21: note = Description of Artificial Sequence: Synthetic oligonucleotide
  source 1..21: mol_type = other DNA
gcgcatagtaataattcgtat

SEQ ID NO: 44679 - DNA, 21 bp, synthetic construct
  misc_feature 1..21: note = Description of Artificial Sequence: Synthetic oligonucleotide
  source 1..21: mol_type = other DNA
aaaagcaacagcagcctcggc

SEQ ID NO: 44680 - DNA, 21 bp, synthetic construct
  misc_feature 1..21: note = Description of Artificial Sequence: Synthetic oligonucleotide
  source 1..21: mol_type = other DNA
ggcagcaacctcaacagcacc

SEQ ID NO: 44681 - DNA, 21 bp, synthetic construct
  misc_feature 1..21: note = Description of Artificial Sequence: Synthetic oligonucleotide
  source 1..21: mol_type = other DNA
agcgcccacagcctcggcatc

SEQ ID NO: 44682 - DNA, 21 bp, synthetic construct
  misc_feature 1..21: note = Description of Artificial Sequence: Synthetic oligonucleotide
  source 1..21: mol_type = other DNA
gggacgaggtctgctgttgtt

SEQ ID NO: 44683 - DNA, 21 bp, synthetic construct
  misc_feature 1..21: note = Description of Artificial Sequence: Synthetic oligonucleotide
  source 1..21: mol_type = other DNA
aatcctggtgagatgcgtctg

SEQ ID NO: 44684 - DNA, 21 bp, synthetic construct
  misc_feature 1..21: note = Description of Artificial Sequence: Synthetic oligonucleotide
  source 1..21: mol_type = other DNA
agaagcgccaacaccaacgcc

SEQ ID NO: 44685 - DNA, 21 bp, synthetic construct
  misc_feature 1..21: note = Description of Artificial Sequence: Synthetic oligonucleotide
  source 1..21: mol_type = other DNA
ggtgtgaatattcatgcgact

SEQ ID NO: 44686 - DNA, 21 bp, synthetic construct
  misc_feature 1..21: note = Description of Artificial Sequence: Synthetic oligonucleotide
  source 1..21: mol_type = other DNA
atcaccgccacccacgcccac

SEQ ID NO: 44687 - DNA, 21 bp, synthetic construct
  misc_feature 1..21: note = Description of Artificial Sequence: Synthetic oligonucleotide
  source 1..21: mol_type = other DNA
aggattacgtcgagtaatcag

SEQ ID NO: 44688 - DNA, 21 bp, synthetic construct
  misc_feature 1..21: note = Description of Artificial Sequence: Synthetic oligonucleotide
  source 1..21: mol_type = other DNA
ctcggcggcggcaccctcaga

SEQ ID NO: 44689 - DNA, 21 bp, synthetic construct
  misc_feature 1..21: note = Description of Artificial Sequence: Synthetic oligonucleotide
  source 1..21: mol_type = other DNA
accgccagcggcagcaacgcc

SEQ ID NO: 44690 - DNA, 21 bp, synthetic construct
  misc_feature 1..21: note = Description of Artificial Sequence: Synthetic oligonucleotide
  source 1..21: mol_type = other DNA
ggcgccgccgtccaagccaac

SEQ ID NO: 44691 - DNA, 21 bp, synthetic construct
  misc_feature 1..21: note = Description of Artificial Sequence: Synthetic oligonucleotide
  source 1..21: mol_type = other DNA
aattctagtcataatgtttct

SEQ ID NO: 44692 - DNA, 21 bp, synthetic construct
  misc_feature 1..21: note = Description of Artificial Sequence: Synthetic oligonucleotide
  source 1..21: mol_type = other DNA
gggaagtctcagatgcagttg

SEQ ID NO: 44693 - DNA, 21 bp, synthetic construct
  misc_feature 1..21: note = Description of Artificial Sequence: Synthetic oligonucleotide
  source 1..21: mol_type = other DNA
ggcgtcagcgccaccgtcaaa

SEQ ID NO: 44694 - DNA, 21 bp, synthetic construct
  misc_feature 1..21: note = Description of Artificial Sequence: Synthetic oligonucleotide
  source 1..21: mol_type = other DNA
ggcgccggcagagccctccaa

SEQ ID NO: 44695 - DNA, 21 bp, synthetic construct
  misc_feature 1..21: note = Description of Artificial Sequence: Synthetic oligonucleotide
  source 1..21: mol_type = other DNA
cttcctggggttcgtgttgcg

SEQ ID NO: 44696 - DNA, 21 bp, synthetic construct
  misc_feature 1..21: note = Description of Artificial Sequence: Synthetic oligonucleotide
  source 1..21: mol_type = other DNA
gccagagaccccggcggcgtc

SEQ ID NO: 44697 - DNA, 21 bp, synthetic construct
  misc_feature 1..21: note = Description of Artificial Sequence: Synthetic oligonucleotide
  source 1..21: mol_type = other DNA
caaaacatcggcagacccagc

SEQ ID NO: 44698 - DNA, 21 bp, synthetic construct
  misc_feature 1..21: note = Description of Artificial Sequence: Synthetic oligonucleotide
  source 1..21: mol_type = other DNA
gccagagacgaccaaagaaga

SEQ ID NO: 44699 - DNA, 21 bp, synthetic construct
  misc_feature 1..21: note = Description of Artificial Sequence: Synthetic oligonucleotide
  source 1..21: mol_type = other DNA
atgtaccaaaaacccgccagc

SEQ ID NO: 44700 - DNA, 21 bp, synthetic construct
  misc_feature 1..21: note = Description of Artificial Sequence: Synthetic oligonucleotide
  source 1..21: mol_type = other DNA
ggcaacagcatggccggcacc

SEQ ID NO: 44701 - DNA, 21 bp, synthetic construct
  misc_feature 1..21: note = Description of Artificial Sequence: Synthetic oligonucleotide
  source 1..21: mol_type = other DNA
ggcctcagcgccatcaacaac

SEQ ID NO: 44702 - DNA, 21 bp, synthetic construct
  misc_feature 1..21: note = Description of Artificial Sequence: Synthetic oligonucleotide
  source 1..21: mol_type = other DNA
accagcaccagaagcagctgc

SEQ ID NO: 44703 - DNA, 21 bp, synthetic construct
  misc_feature 1..21: note = Description of Artificial Sequence: Synthetic oligonucleotide
  source 1..21: mol_type = other DNA
gtgacgatgcctccgagtgct

SEQ ID NO: 44704 - DNA, 21 bp, synthetic construct
  misc_feature 1..21: note = Description of Artificial Sequence: Synthetic oligonucleotide
  source 1..21: mol_type = other DNA
atgagtcatactaagtcgaat

SEQ ID NO: 44705 - DNA, 21 bp, synthetic construct
  misc_feature 1..21: note = Description of Artificial Sequence: Synthetic oligonucleotide
  source 1..21: mol_type = other DNA
aaacaacccgccagcacccac

SEQ ID NO: 44706 - DNA, 21 bp, synthetic construct
  misc_feature 1..21: note = Description of Artificial Sequence: Synthetic oligonucleotide
  source 1..21: mol_type = other DNA
cacgacagcagcgccagaacc

SEQ ID NO: 44707 - DNA, 21 bp, synthetic construct
  misc_feature 1..21: note = Description of Artificial Sequence: Synthetic oligonucleotide
  source 1..21: mol_type = other DNA
cagcggaatgtgagtgtggtt

SEQ ID NO: 44708 - DNA, 21 bp, synthetic construct
  misc_feature 1..21: note = Description of Artificial Sequence: Synthetic oligonucleotide
  source 1..21: mol_type = other DNA
aggattggtcagggttcgagt

SEQ ID NO: 44709 - DNA, 21 bp, synthetic construct
  misc_feature 1..21: note = Description of Artificial Sequence: Synthetic oligonucleotide
  source 1..21: mol_type = other DNA
aggagtacgaggattagtgag

SEQ ID NO: 44710 - DNA, 21 bp, synthetic construct
  misc_feature 1..21: note = Description of Artificial Sequence: Synthetic oligonucleotide
  source 1..21: mol_type = other DNA
caagtcaacagcatccccgcc

SEQ ID NO: 44711 - DNA, 21 bp, synthetic construct
  misc_feature 1..21: note = Description of Artificial Sequence: Synthetic oligonucleotide
  source 1..21: mol_type = other DNA
caaagacccagcaccggcaac

SEQ ID NO: 44712 - DNA, 21 bp, synthetic construct
  misc_feature 1..21: note = Description of Artificial Sequence: Synthetic oligonucleotide
  source 1..21: mol_type = other DNA
agttttagggctcaggagggg

SEQ ID NO: 44713 - DNA, 21 bp, synthetic construct
  misc_feature 1..21: note = Description of Artificial Sequence: Synthetic oligonucleotide
  source 1..21: mol_type = other DNA
gacagcacccacagagccacc

SEQ ID NO: 44714 - DNA, 21 bp, synthetic construct
  misc_feature 1..21: note = Description of Artificial Sequence: Synthetic oligonucleotide
  source 1..21: mol_type = other DNA
ctcatgcacagcgccgtcagc

SEQ ID NO: 44715 - DNA, 21 bp, synthetic construct
  misc_feature 1..21: note = Description of Artificial Sequence: Synthetic oligonucleotide
  source 1..21: mol_type = other DNA
acgcatcagagttcgacgtcg

SEQ ID NO: 44716 - DNA, 21 bp, synthetic construct
  misc_feature 1..21: note = Description of Artificial Sequence: Synthetic oligonucleotide
  source 1..21: mol_type = other DNA
cccaacggcgcccacgtcacc

SEQ ID NO: 44717 - DNA, 21 bp, synthetic construct
  misc_feature 1..21: note = Description of Artificial Sequence: Synthetic oligonucleotide
  source 1..21: mol_type = other DNA
caaaccagcagcagagaaatg

SEQ ID NO: 44718 - DNA, 21 bp, synthetic construct
  misc_feature 1..21: note = Description of Artificial Sequence: Synthetic oligonucleotide
  source 1..21: mol_type = other DNA
gctaggggtgcttctactaat

SEQ ID NO: 44719 - DNA, 21 bp, synthetic construct
  misc_feature 1..21: note = Description of Artificial Sequence: Synthetic oligonucleotide
  source 1..21: mol_type = other DNA
aatgggttttcgcctagggtg

SEQ ID NO: 44720 - DNA, 21 bp, synthetic construct
  misc_feature 1..21: note = Description of Artificial Sequence: Synthetic oligonucleotide
  source 1..21: mol_type = other DNA
agaagcctccccaacgtcgcc

SEQ ID NO: 44721 - DNA, 21 bp, synthetic construct
  misc_feature 1..21: note = Description of Artificial Sequence: Synthetic oligonucleotide
  source 1..21: mol_type = other DNA
ggtactacttctagtcgggat

SEQ ID NO: 44722 - DNA, 21 bp, synthetic construct
  misc_feature 1..21: note = Description of Artificial Sequence: Synthetic oligonucleotide
  source 1..21: mol_type = other DNA
gctcagcggtcgactatggtg

SEQ ID NO: 44723 - DNA, 21 bp, synthetic construct
  misc_feature 1..21: note = Description of Artificial Sequence: Synthetic oligonucleotide
  source 1..21: mol_type = other DNA
tctggtggtggtacgaggact

SEQ ID NO: 44724 - DNA, 21 bp, synthetic construct
  misc_feature 1..21: note = Description of Artificial Sequence: Synthetic oligonucleotide
  source 1..21: mol_type = other DNA
caacccgccggcaaagtcgtc

SEQ ID NO: 44725 - DNA, 21 bp, synthetic construct
  misc_feature 1..21: note = Description of Artificial Sequence: Synthetic oligonucleotide
  source 1..21: mol_type = other DNA
catcagtctggtagtacgtgt

SEQ ID NO: 44726 - DNA, 21 bp, synthetic construct
  misc_feature 1..21: note = Description of Artificial Sequence: Synthetic oligonucleotide
  source 1..21: mol_type = other DNA
cagcttggtacgaataatagt

SEQ ID NO: 44727 - DNA, 21 bp, synthetic construct
  misc_feature 1..21: note = Description of Artificial Sequence: Synthetic oligonucleotide
  source 1..21: mol_type = other DNA
tttcgggcgcaggctaatgtt

SEQ ID NO: 44728 - DNA, 21 bp, synthetic construct
  misc_feature 1..21: note = Description of Artificial Sequence: Synthetic oligonucleotide
  source 1..21: mol_type = other DNA
agtcgtgctcagtcgcagatt

SEQ ID NO: 44729 - DNA, 21 bp, synthetic construct
  misc_feature 1..21: note = Description of Artificial Sequence: Synthetic oligonucleotide
  source 1..21: mol_type = other DNA
ccgaggacggatcgtaatact

SEQ ID NO: 44730 - DNA, 21 bp, synthetic construct
  misc_feature 1..21: note = Description of Artificial Sequence: Synthetic oligonucleotide
  source 1..21: mol_type = other DNA
aggactttgagtgcttcgtcg

SEQ ID NO: 44731 - DNA, 21 bp, synthetic construct
  misc_feature 1..21: note = Description of Artificial Sequence: Synthetic oligonucleotide
  source 1..21: mol_type = other DNA
agttttagtcctgcttctaat

SEQ ID NO: 44732 - DNA, 21 bp, synthetic construct
  misc_feature 1..21: note = Description of Artificial Sequence: Synthetic oligonucleotide
  source 1..21: mol_type = other DNA
gacagagccctccacatgagc

SEQ ID NO: 44733 - DNA, 21 bp, synthetic construct
  misc_feature 1..21: note = Description of Artificial Sequence: Synthetic oligonucleotide
  source 1..21: mol_type = other DNA
aaaatcgccagcaaaagcgaa

SEQ ID NO: 44734 - DNA, 21 bp, synthetic construct
  misc_feature 1..21: note = Description of Artificial Sequence: Synthetic oligonucleotide
  source 1..21: mol_type = other DNA
agcggcggcgactacgccaaa

SEQ ID NO: 44735 - DNA, 21 bp, synthetic construct
  misc_feature 1..21: note = Description of Artificial Sequence: Synthetic oligonucleotide
  source 1..21: mol_type = other DNA
cccctcagagacagcatgccc

SEQ ID NO: 44736 - DNA, 21 bp, synthetic construct
  misc_feature 1..21: note = Description of Artificial Sequence: Synthetic oligonucleotide
  source 1..21: mol_type = other DNA
actcagccttctcatgattcg

SEQ ID NO: 44737 - DNA, 21 bp, synthetic construct
  misc_feature 1..21: note = Description of Artificial Sequence: Synthetic oligonucleotide
  source 1..21: mol_type = other DNA
gtgcagacgcatcaggttcgt

SEQ ID NO: 44738 - DNA, 21 bp, synthetic construct
  misc_feature 1..21: note = Description of Artificial Sequence: Synthetic oligonucleotide
  source 1..21: mol_type = other DNA
gggattaattctcgggggtcg

SEQ ID NO: 44739 - DNA, 21 bp, synthetic construct
  misc_feature 1..21: note = Description of Artificial Sequence: Synthetic oligonucleotide
  source 1..21: mol_type = other DNA
ctcatcagcgaaaccagcaga

SEQ ID NO: 44740 - DNA, 21 bp, synthetic construct
  misc_feature 1..21: note = Description of Artificial Sequence: Synthetic oligonucleotide
  source 1..21: mol_type = other DNA
tcgagtgttgggaggctgaat

SEQ ID NO: 44741 - DNA, 21 bp, synthetic construct
  misc_feature 1..21: note = Description of Artificial Sequence: Synthetic oligonucleotide
  source 1..21: mol_type = other DNA
aactacagcggcgcccacacc

SEQ ID NO: 44742 - DNA, 21 bp, synthetic construct
  misc_feature 1..21: note = Description of Artificial Sequence: Synthetic oligonucleotide
  source 1..21: mol_type = other DNA
ggtactaattctactaggggt

SEQ ID NO: 44743 - DNA, 21 bp, synthetic construct
  misc_feature 1..21: note = Description of Artificial Sequence: Synthetic oligonucleotide
  source 1..21: mol_type = other DNA
aaccaaagcagacccggcgtc

SEQ ID NO: 44744 - DNA, 21 bp, synthetic construct
  misc_feature 1..21: note = Description of Artificial Sequence: Synthetic oligonucleotide
  source 1..21: mol_type = other DNA
tacgtcagcaacagcaacgcc

SEQ ID NO: 44745 - DNA, 21 bp, synthetic construct
  misc_feature 1..21: note = Description of Artificial Sequence: Synthetic oligonucleotide
  source 1..21: mol_type = other DNA
gacaacatcagcagaagcaga

SEQ ID NO: 44746 - DNA, 21 bp, synthetic construct
  misc_feature 1..21: note = Description of Artificial Sequence: Synthetic oligonucleotide
  source 1..21: mol_type = other DNA
acctacagcagcaaagccgac

SEQ ID NO: 44747 - DNA, 21 bp, synthetic construct
  misc_feature 1..21: note = Description of Artificial Sequence: Synthetic oligonucleotide
  source 1..21: mol_type = other DNA
cgtgttgagagtcctactaat

SEQ ID NO: 44748 - DNA, 21 bp, synthetic construct
  misc_feature 1..21: note = Description of Artificial Sequence: Synthetic oligonucleotide
  source 1..21: mol_type = other DNA
aattcggctgctttgaatagt

SEQ ID NO: 44749 - DNA, 21 bp, synthetic construct
  misc_feature 1..21: note = Description of Artificial Sequence: Synthetic oligonucleotide
  source 1..21: mol_type = other DNA
gctcagattaatacgcctact

SEQ ID NO: 44750 - DNA, 21 bp, synthetic construct
  misc_feature 1..21: note = Description of Artificial Sequence: Synthetic oligonucleotide
  source 1..21: mol_type = other DNA
ccgttgggtgctacgtttgcg

SEQ ID NO: 44751 - DNA, 21 bp, synthetic construct
  misc_feature 1..21: note = Description of Artificial Sequence: Synthetic oligonucleotide
  source 1..21: mol_type = other DNA
tcgtatagtggtactcttggt

SEQ ID NO: 44752 - DNA, 21 bp, synthetic construct
  misc_feature 1..21: note = Description of Artificial Sequence: Synthetic oligonucleotide
  source 1..21: mol_type = other DNA
tttgttagtggtaaggtgcag

SEQ ID NO: 44753 - DNA, 21 bp, synthetic construct
  misc_feature 1..21: note = Description of Artificial Sequence: Synthetic oligonucleotide
  source 1..21: mol_type = other DNA
atgaacggcaaagacgtcgtc

SEQ ID NO: 44754 - DNA, 21 bp, synthetic construct
  misc_feature 1..21: note = Description of Artificial Sequence: Synthetic oligonucleotide
  source 1..21: mol_type = other DNA
cctactagtaatgggagtctt

SEQ ID NO: 44755 - DNA, 21 bp, synthetic construct
  misc_feature 1..21: note = Description of Artificial Sequence: Synthetic oligonucleotide
  source 1..21: mol_type = other DNA
tacagcggcctcaccggcagc

SEQ ID NO: 44756 - DNA, 21 bp, synthetic construct
  misc_feature 1..21: note = Description of Artificial Sequence: Synthetic oligonucleotide
  source 1..21: mol_type = other DNA
aatattggttctcaggggcgt

SEQ ID NO: 44757 - DNA, 21 bp, synthetic construct
  misc_feature 1..21: note = Description of Artificial Sequence: Synthetic oligonucleotide
  source 1..21: mol_type = other DNA
atgggtcatgctaagacggct

SEQ ID NO: 44758 - DNA, 21 bp, synthetic construct
  misc_feature 1..21: note = Description of Artificial Sequence: Synthetic oligonucleotide
  source 1..21: mol_type = other DNA
ccgttgcagcctagggttgcg

SEQ ID NO: 44759 - DNA, 21 bp, synthetic construct
  misc_feature 1..21: note = Description of Artificial Sequence: Synthetic oligonucleotide
  source 1..21: mol_type = other DNA
agggatggtgggcaggatcgg

SEQ ID NO: 44760 - DNA, 21 bp, synthetic construct
  misc_feature 1..21: note = Description of Artificial Sequence: Synthetic oligonucleotide
  source 1..21: mol_type = other DNA
cagtgtaattcggcttgtcag

SEQ ID NO: 44761 - DNA, 21 bp, synthetic construct
  misc_feature 1..21: note = Description of Artificial Sequence: Synthetic oligonucleotide
  source 1..21: mol_type = other DNA
accggcctcaaagaccaacac

SEQ ID NO: 44762 - DNA, 21 bp, synthetic construct
  misc_feature 1..21: note = Description of Artificial Sequence: Synthetic oligonucleotide
  source 1..21: mol_type = other DNA
catgagctgtcgaggactact

SEQ ID NO: 44763 - DNA, 21 bp, synthetic construct
  misc_feature 1..21: note = Description of Artificial Sequence: Synthetic oligonucleotide
  source 1..21: mol_type = other DNA
gggcggtcttctcatatggat

SEQ ID NO: 44764 - DNA, 21 bp, synthetic construct
  misc_feature 1..21: note = Description of Artificial Sequence: Synthetic oligonucleotide
  source 1..21: mol_type = other DNA
tcggctgctaagcctgggcct

SEQ ID NO: 44765 - DNA, 21 bp, synthetic construct
  misc_feature 1..21: note = Description of Artificial Sequence: Synthetic oligonucleotide
  source 1..21: mol_type = other DNA
atcggcagcaacgccagacaa

SEQ ID NO: 44766 - DNA, 21 bp, synthetic construct
  misc_feature 1..21: note = Description of Artificial Sequence: Synthetic oligonucleotide
  source 1..21: mol_type = other DNA
ctgagtggtcatagtcctcag

SEQ ID NO: 44767 - DNA, 21 bp, synthetic construct
  misc_feature 1..21: note = Description of Artificial Sequence: Synthetic oligonucleotide
  source 1..21: mol_type = other DNA
acgtctaattctattcagggg

SEQ ID NO: 44768 - DNA, 21 bp, synthetic construct
  misc_feature 1..21: note = Description of Artificial Sequence: Synthetic oligonucleotide
  source 1..21: mol_type = other DNA
cctcttcagacgagtaggact

SEQ ID NO: 44769 - DNA, 21 bp, synthetic construct
  misc_feature 1..21: note = Description of Artificial Sequence: Synthetic oligonucleotide
  source 1..21: mol_type = other DNA
cccaacaccaaacccgtcctc

SEQ ID NO: 44770 - DNA, 21 bp, synthetic construct
  misc_feature 1..21: note = Description of Artificial Sequence: Synthetic oligonucleotide
  source 1..21: mol_type = other DNA
tcgttgaatagtagggagggt

SEQ ID NO: 44771 - DNA, 21 bp, synthetic construct
  misc_feature 1..21: note = Description of Artificial Sequence: Synthetic oligonucleotide
  source 1..21: mol_type = other DNA
catcgtgatacgaatgggaag

SEQ ID NO: 44772 - DNA, 21 bp, synthetic construct
  misc_feature 1..21: note = Description of Artificial Sequence: Synthetic oligonucleotide
  source 1..21: mol_type = other DNA
gctgagcagaggccggggcag

SEQ ID NO: 44773 - DNA, 21 bp, synthetic construct
  misc_feature 1..21: note = Description of Artificial Sequence: Synthetic oligonucleotide
  source 1..21: mol_type = other DNA
ccggttttgaataaggcgacg

SEQ ID NO: 44774 - DNA, 21 bp, synthetic construct
  misc_feature 1..21: note = Description of Artificial Sequence: Synthetic oligonucleotide
  source 1..21: mol_type = other DNA
cctaggactaataatcctagt

SEQ ID NO: 44775 - DNA, 21 bp, synthetic construct
  misc_feature 1..21: note = Description of Artificial Sequence: Synthetic oligonucleotide
  source 1..21: mol_type = other DNA
cccctcgacaaaagcatgatg

SEQ ID NO: 44776 - DNA, 21 bp, synthetic construct
  misc_feature 1..21: note = Description of Artificial Sequence: Synthetic oligonucleotide
  source 1..21: mol_type = other DNA
atgagcaccggcgtcagcccc

SEQ ID NO: 44777 - DNA, 21 bp, synthetic construct
  misc_feature 1..21: note = Description of Artificial Sequence: Synthetic oligonucleotide
  source 1..21: mol_type = other DNA
aaacaacccgtcagcacccac

SEQ ID NO: 44778 - DNA, 21 bp, synthetic construct
  misc_feature 1..21: note = Description of Artificial Sequence: Synthetic oligonucleotide
  source 1..21: mol_type = other DNA
gtcagaagcaaagaagcccac

SEQ ID NO: 44779 - DNA, 21 bp, synthetic construct
  misc_feature 1..21: note = Description of Artificial Sequence: Synthetic oligonucleotide
  source 1..21: mol_type = other DNA
actcagcagaatgggagtaat

SEQ ID NO: 44780 - DNA, 21 bp, synthetic construct
  misc_feature 1..21: note = Description of Artificial Sequence: Synthetic oligonucleotide
  source 1..21: mol_type = other DNA
tgccaaagcagcagagtcacc

SEQ ID NO: 44781 - DNA, 21 bp, synthetic construct
  misc_feature 1..21: note = Description of Artificial Sequence: Synthetic oligonucleotide
  source 1..21: mol_type = other DNA
acgcagatgggtaagtcgaat

SEQ ID NO: 44782 - DNA, 21 bp, synthetic construct
  misc_feature 1..21: note = Description of Artificial Sequence: Synthetic oligonucleotide
  source 1..21: mol_type = other DNA
gagtatcctcagcaggcgaag

SEQ ID NO: 44783 - DNA, 21 bp, synthetic construct
  misc_feature 1..21: note = Description of Artificial Sequence: Synthetic oligonucleotide
  source 1..21: mol_type = other DNA
cccaacaacgccaccaaaaac

SEQ ID NO: 44784 - DNA, 21 bp, synthetic construct
  misc_feature 1..21: note = Description of Artificial Sequence: Synthetic oligonucleotide
  source 1..21: mol_type = other DNA
gggtctcttccttcttgtcgg

SEQ ID NO: 44785 - DNA, 21 bp, synthetic construct
  misc_feature 1..21: note = Description of Artificial Sequence: Synthetic oligonucleotide
  source 1..21: mol_type = other DNA
actcagcggtcgcaggctgct

SEQ ID NO: 44786 - DNA, 21 bp, synthetic construct
  misc_feature 1..21: note = Description of Artificial Sequence: Synthetic oligonucleotide
  source 1..21: mol_type = other DNA
gagggtaatcgttctaatatg

SEQ ID NO: 44787 - DNA, 21 bp, synthetic construct
  misc_feature 1..21: note = Description of Artificial Sequence: Synthetic oligonucleotide
  source 1..21: mol_type = other DNA
atgggggtgcggccgtcggcg

SEQ ID NO: 44788 - DNA, 21 bp, synthetic construct
  misc_feature 1..21: note = Description of Artificial Sequence: Synthetic oligonucleotide
  source 1..21: mol_type = other DNA
cacggcgtcggcagcatggtc

SEQ ID NO: 44789 - DNA, 21 bp, synthetic construct
  misc_feature 1..21: note = Description of Artificial Sequence: Synthetic oligonucleotide
  source 1..21: mol_type = other DNA
agcaccaccgcccaagtcaaa

SEQ ID NO: 44790 - DNA, 21 bp, synthetic construct
  misc_feature 1..21: note = Description of Artificial Sequence: Synthetic oligonucleotide
  source 1..21: mol_type = other DNA
tcgcataataggacgaatgat

SEQ ID NO: 44791 - DNA, 21 bp, synthetic construct
  misc_feature 1..21: note = Description of Artificial Sequence: Synthetic oligonucleotide
  source 1..21: mol_type = other DNA
aataattctatttctaatccg

SEQ ID NO: 44792 - DNA, 21 bp, synthetic construct
  misc_feature 1..21: note = Description of Artificial Sequence: Synthetic oligonucleotide
  source 1..21: mol_type = other DNA
ggcggcctcagccccaaagtc

SEQ ID NO: 44793 - DNA, 21 bp, synthetic construct
  misc_feature 1..21: note = Description of Artificial Sequence: Synthetic oligonucleotide
  source 1..21: mol_type = other DNA
tcgattccgtcgactagtcag

SEQ ID NO: 44794 - DNA, 21 bp, synthetic construct
  misc_feature 1..21: note = Description of Artificial Sequence: Synthetic oligonucleotide
  source 1..21: mol_type = other DNA
accggcagcggcaccatcctc

SEQ ID NO: 44795 - DNA, 21 bp, synthetic construct
  misc_feature 1..21: note = Description of Artificial Sequence: Synthetic oligonucleotide
  source 1..21: mol_type = other DNA
actgcgacgacgctttcgagt

SEQ ID NO: 44796 - DNA, 21 bp, synthetic construct
  misc_feature 1..21: note = Description of Artificial Sequence: Synthetic oligonucleotide
  source 1..21: mol_type = other DNA
ccccccagcaacggcagactc

SEQ ID NO: 44797 - DNA, 21 bp, synthetic construct
  misc_feature 1..21: note = Description of Artificial Sequence: Synthetic oligonucleotide
  source 1..21: mol_type = other DNA
caccaaagcagccccccctgc

SEQ ID NO: 44798 - DNA, 21 bp, synthetic construct
  misc_feature 1..21: note = Description of Artificial Sequence: Synthetic oligonucleotide
  source 1..21: mol_type = other DNA
agtttttcgtcgactatgggt

SEQ ID NO: 44799 - DNA, 21 bp, synthetic construct
  misc_feature 1..21: note = Description of Artificial Sequence: Synthetic oligonucleotide
  source 1..21: mol_type = other DNA
atgaggtctgagcgtgctgct

SEQ ID NO: 44800 - DNA, 21 bp, synthetic construct
  misc_feature 1..21: note = Description of Artificial Sequence: Synthetic oligonucleotide
  source 1..21: mol_type = other DNA
ggtagtacgggtagttctatt

SEQ ID NO: 44801 - DNA, 21 bp, synthetic construct
  misc_feature 1..21: note = Description of Artificial Sequence: Synthetic oligonucleotide
  source 1..21: mol_type = other DNA
ggcatcacccacggcagccac

SEQ ID NO: 44802 - DNA, 21 bp, synthetic construct
  misc_feature 1..21: note = Description of Artificial Sequence: Synthetic oligonucleotide
  source 1..21: mol_type = other DNA
ggcacccccaacaccaaagtc

SEQ ID NO: 44803 - DNA, 21 bp, synthetic construct
  misc_feature 1..21: note = Description of Artificial Sequence: Synthetic oligonucleotide
  source 1..21: mol_type = other DNA
ggcttccccaacgtcgccacc

SEQ ID NO: 44804 - DNA, 21 bp, synthetic construct
  misc_feature 1..21: note = Description of Artificial Sequence: Synthetic oligonucleotide
  source 1..21: mol_type = other DNA
cctttgtctgggtcgaaggct

SEQ ID NO: 44805 - DNA, 21 bp, synthetic construct
  misc_feature 1..21: note = Description of Artificial Sequence: Synthetic oligonucleotide
  source 1..21: mol_type = other DNA
gttactaagtcgggtaatggg

SEQ ID NO: 44806 - DNA, 21 bp, synthetic construct
  misc_feature 1..21: note = Description of Artificial Sequence: Synthetic oligonucleotide
  source 1..21: mol_type = other DNA
gccagaagcgaaagcaccgcc

SEQ ID NO: 44807 - DNA, 21 bp, synthetic construct
  misc_feature 1..21: note = Description of Artificial Sequence: Synthetic oligonucleotide
  source 1..21: mol_type = other DNA
tacgtcagcagcggcaaagcc

SEQ ID NO: 44808 - DNA, 21 bp, synthetic construct
  misc_feature 1..21: note = Description of Artificial Sequence: Synthetic oligonucleotide
  source 1..21: mol_type = other DNA
cagaagggtaataatttgccg

SEQ ID NO: 44809 - DNA, 21 bp, synthetic construct
  misc_feature 1..21: note = Description of Artificial Sequence: Synthetic oligonucleotide
  source 1..21: mol_type = other DNA
cagcctattattagtcctacg

SEQ ID NO: 44810 - DNA, 21 bp, synthetic construct
  misc_feature 1..21: note = Description of Artificial Sequence: Synthetic oligonucleotide
  source 1..21: mol_type = other DNA
ggcagagacaacagcagacaa

SEQ ID NO: 44811 - DNA, 21 bp, synthetic construct
  misc_feature 1..21: note = Description of Artificial Sequence: Synthetic oligonucleotide
  source 1..21: mol_type = other DNA
gtccccagccaaagcctccac

SEQ ID NO: 44812 - DNA, 21 bp, synthetic construct
  misc_feature 1..21: note = Description of Artificial Sequence: Synthetic oligonucleotide
  source 1..21: mol_type = other DNA
ccgacggttcaggttacgaag

SEQ ID NO: 44813 - DNA, 21 bp, synthetic construct
  misc_feature 1..21: note = Description of Artificial Sequence: Synthetic oligonucleotide
  source 1..21: mol_type = other DNA
ctcaccgccatccaccccgcc

SEQ ID NO: 44814 - DNA, 21 bp, synthetic construct
  misc_feature 1..21: note = Description of Artificial Sequence: Synthetic oligonucleotide
  source 1..21: mol_type = other DNA
ctcagccaaagcaacacccac

SEQ ID NO: 44815 - DNA, 21 bp, synthetic construct
  misc_feature 1..21: note = Description of Artificial Sequence: Synthetic oligonucleotide
  source 1..21: mol_type = other DNA
cgtgatcggactaatgctgct

SEQ ID NO: 44816 - DNA, 21 bp, synthetic construct
  misc_feature 1..21: note = Description of Artificial Sequence: Synthetic oligonucleotide
  source 1..21: mol_type = other DNA
gtgggttctagtaagggttgt

SEQ ID NO: 44817 - DNA, 21 bp, synthetic construct
  misc_feature 1..21: note = Description of Artificial Sequence: Synthetic oligonucleotide
  source 1..21: mol_type = other DNA
cttcctacgagtagtgttgcg

SEQ ID NO: 44818 - DNA, 21 bp, synthetic construct
  misc_feature 1..21: note = Description of Artificial Sequence: Synthetic oligonucleotide
  source 1..21: mol_type = other DNA
aatgggattagtaagtctaat

SEQ ID NO: 44819 - DNA, 21 bp, synthetic construct
  misc_feature 1..21: note = Description of Artificial Sequence: Synthetic oligonucleotide
  source 1..21: mol_type = other DNA
agcggcgtcgaaagagtcaac

SEQ ID NO: 44820 - DNA, 21 bp, synthetic construct
  misc_feature 1..21: note = Description of Artificial Sequence: Synthetic oligonucleotide
  source 1..21: mol_type = other DNA
ctcgtcagaaccaccaccgcc

SEQ ID NO: 44821 - DNA, 21 bp, synthetic construct
  misc_feature 1..21: note = Description of Artificial Sequence: Synthetic oligonucleotide
  source 1..21: mol_type = other DNA
tctcagtctaatagttttctg

SEQ ID NO: 44822 - DNA, 21 bp, synthetic construct
  misc_feature 1..21: note = Description of Artificial Sequence: Synthetic oligonucleotide
  source 1..21: mol_type = other DNA
ccgtcgggtcctgttaggggg

SEQ ID NO: 44823 - DNA, 21 bp, synthetic construct
  misc_feature 1..21: note = Description of Artificial Sequence: Synthetic oligonucleotide
  source 1..21: mol_type = other DNA
cacagaagcaacagcaccacc

SEQ ID NO: 44824 - DNA, 21 bp, synthetic construct
  misc_feature 1..21: note = Description of Artificial Sequence: Synthetic oligonucleotide
  source 1..21: mol_type = other DNA
agagacagcaccgccgccaga

SEQ ID NO: 44825 - DNA, 21 bp, synthetic construct
  misc_feature 1..21: note = Description of Artificial Sequence: Synthetic oligonucleotide
  source 1..21: mol_type = other DNA
cagtctatttctcatacgcgt

SEQ ID NO: 44826 - DNA, 21 bp, synthetic construct
  misc_feature 1..21: note = Description of Artificial Sequence: Synthetic oligonucleotide
  source 1..21: mol_type = other DNA
cacaacaccgcccacgccagc

SEQ ID NO: 44827 - DNA, 21 bp, synthetic construct
  misc_feature 1..21: note = Description of Artificial Sequence: Synthetic oligonucleotide
  source 1..21: mol_type = other DNA
tctccgcatcgggatacggtt

SEQ ID NO: 44828 - DNA, 21 bp, synthetic construct
  misc_feature 1..21: note = Description of Artificial Sequence: Synthetic oligonucleotide
  source 1..21: mol_type = other DNA
tcgccgatgggtgttactcgg

SEQ ID NO: 44829 - DNA, 21 bp, synthetic construct
  misc_feature 1..21: note = Description of Artificial Sequence: Synthetic oligonucleotide
  source 1..21: mol_type = other DNA
cggggtccgactggtatgatg

SEQ ID NO: 44830 - DNA, 21 bp, synthetic construct
  misc_feature 1..21: note = Description of Artificial Sequence: Synthetic oligonucleotide
  source 1..21: mol_type = other DNA
acgacttatggtagtctgggg

SEQ ID NO: 44831 - DNA, 21 bp, synthetic construct
  misc_feature 1..21: note = Description of Artificial Sequence: Synthetic oligonucleotide
  source 1..21: mol_type = other DNA
agtctgcatcaggtgggtggg

SEQ ID NO: 44832 - DNA, 21 bp, synthetic construct
  misc_feature 1..21: note = Description of Artificial Sequence: Synthetic oligonucleotide
  source 1..21: mol_type = other DNA
agtggtcagcattctttgaat

SEQ ID NO: 44833 - DNA, 21 bp, synthetic construct
  misc_feature 1..21: note = Description of Artificial Sequence: Synthetic oligonucleotide
  source 1..21: mol_type = other DNA
ggcaacagcaacaccctcgcc

SEQ ID NO: 44834 - DNA, 21 bp, synthetic construct
  misc_feature 1..21: note = Description of Artificial Sequence: Synthetic oligonucleotide
  source 1..21: mol_type = other DNA
aacacccacaacatccaaggc

SEQ ID NO: 44835 - DNA, 21 bp, synthetic construct
  misc_feature 1..21: note = Description of Artificial Sequence: Synthetic oligonucleotide
  source 1..21: mol_type = other DNA
gtccaacccgtcaaaatgagc

SEQ ID NO: 44836 - DNA, 21 bp, synthetic construct
  misc_feature 1..21: note = Description of Artificial Sequence: Synthetic oligonucleotide
  source 1..21: mol_type = other DNA
aacgcttctggacagaatcaa

SEQ ID NO: 44837 - DNA, 21 bp, synthetic construct
  misc_feature 1..21: note = Description of Artificial Sequence: Synthetic oligonucleotide
  source 1..21: mol_type = other DNA
gggcctaatccgggtaatcat

SEQ ID NO: 44838 - DNA, 21 bp, synthetic construct
  misc_feature 1..21: note = Description of Artificial Sequence: Synthetic oligonucleotide
  source 1..21: mol_type = other DNA
agcagaaacgccgccaacgcc

SEQ ID NO: 44839 - DNA, 21 bp, synthetic construct
  misc_feature 1..21: note = Description of Artificial Sequence: Synthetic oligonucleotide
  source 1..21: mol_type = other DNA
atgtctaggtctgatcctcct

SEQ ID NO: 44840 - DNA, 21 bp, synthetic construct
  misc_feature 1..21: note = Description of Artificial Sequence: Synthetic oligonucleotide
  source 1..21: mol_type = other DNA
actggtactaagtcggataat

SEQ ID NO: 44841 - DNA, 21 bp, synthetic construct
  misc_feature 1..21: note = Description of Artificial Sequence: Synthetic oligonucleotide
  source 1..21: mol_type = other DNA
aacggcagcggccaaacccaa

SEQ ID NO: 44842 - DNA, 21 bp, synthetic construct
  misc_feature 1..21: note = Description of Artificial Sequence: Synthetic oligonucleotide
  source 1..21: mol_type = other DNA
aacagcggcgccagactcagc

SEQ ID NO: 44843 - DNA, 21 bp, synthetic construct
  misc_feature 1..21: note = Description of Artificial Sequence: Synthetic oligonucleotide
  source 1..21: mol_type = other DNA
accaacagccaaaaactcgcc

SEQ ID NO: 44844 - DNA, 21 bp, synthetic construct
  misc_feature 1..21: note = Description of Artificial Sequence: Synthetic oligonucleotide
  source 1..21: mol_type = other DNA
cttggggctgggcagagggag

SEQ ID NO: 44845 - DNA, 21 bp, synthetic construct
  misc_feature 1..21: note = Description of Artificial Sequence: Synthetic oligonucleotide
  source 1..21: mol_type = other DNA
agcatgagcgaacacctcaaa

SEQ ID NO: 44846 - DNA, 21 bp, synthetic construct
  misc_feature 1..21: note = Description of Artificial Sequence: Synthetic oligonucleotide
  source 1..21: mol_type = other DNA
ggtactggtcatcagaggtct

SEQ ID NO: 44847 - DNA, 21 bp, synthetic construct
  misc_feature 1..21: note = Description of Artificial Sequence: Synthetic oligonucleotide
  source 1..21: mol_type = other DNA
caccacagcaccctccaaacc

SEQ ID NO: 44848 - DNA, 21 bp, synthetic construct
  misc_feature 1..21: note = Description of Artificial Sequence: Synthetic oligonucleotide
  source 1..21: mol_type = other DNA
agcggcggcaaaagcgccctc

SEQ ID NO: 44849 - DNA, 21 bp, synthetic construct
  misc_feature 1..21: note = Description of Artificial Sequence: Synthetic oligonucleotide
  source 1..21: mol_type = other DNA
gcgccgaatggtatgcaggct

SEQ ID NO: 44850 - DNA, 21 bp, synthetic construct
  misc_feature 1..21: note = Description of Artificial Sequence: Synthetic oligonucleotide
  source 1..21: mol_type = other DNA
taccaagccaacgccctcggc

SEQ ID NO: 44851 - DNA, 21 bp, synthetic construct
  misc_feature 1..21: note = Description of Artificial Sequence: Synthetic oligonucleotide
  source 1..21: mol_type = other DNA
agaaccggcaacaaccacgaa

SEQ ID NO: 44852 - DNA, 21 bp, synthetic construct
  misc_feature 1..21: note = Description of Artificial Sequence: Synthetic oligonucleotide
  source 1..21: mol_type = other DNA
agtcagagtagtcctgttgcg

SEQ ID NO: 44853 - DNA, 21 bp, synthetic construct
  misc_feature 1..21: note = Description of Artificial Sequence: Synthetic oligonucleotide
  source 1..21: mol_type = other DNA
gacggcctcagaaacagcctc

SEQ ID NO: 44854 - DNA, 21 bp, synthetic construct
  misc_feature 1..21: note = Description of Artificial Sequence: Synthetic oligonucleotide
  source 1..21: mol_type = other DNA
gaccacagaaacatcagcagc

SEQ ID NO: 44855 - DNA, 21 bp, synthetic construct
  misc_feature 1..21: note = Description of Artificial Sequence: Synthetic oligonucleotide
  source 1..21: mol_type = other DNA
tcggggggtactcacattgcg

SEQ ID NO: 44856 - DNA, 21 bp, synthetic construct
  misc_feature 1..21: note = Description of Artificial Sequence: Synthetic oligonucleotide
  source 1..21: mol_type = other DNA
agtaatactaggtctctttcg

SEQ ID NO: 44857 - DNA, 21 bp, synthetic construct
  misc_feature 1..21: note = Description of Artificial Sequence: Synthetic oligonucleotide
  source 1..21: mol_type = other DNA
gagaggcctgggggtacgcct

SEQ ID NO: 44858 - DNA, 21 bp, synthetic construct
  misc_feature 1..21: note = Description of Artificial Sequence: Synthetic oligonucleotide
  source 1..21: mol_type = other DNA
agtgttgctgatactcgtctg

SEQ ID NO: 44859 - DNA, 21 bp, synthetic construct
  misc_feature 1..21: note = Description of Artificial Sequence: Synthetic oligonucleotide
  source 1..21: mol_type = other DNA
ccgatgtctcatgtgtcgggg

SEQ ID NO: 44860 - DNA, 21 bp, synthetic construct
  misc_feature 1..21: note = Description of Artificial Sequence: Synthetic oligonucleotide
  source 1..21: mol_type = other DNA
gacagaagcgccaccgccacc

SEQ ID NO: 44861 - DNA, 21 bp, synthetic construct
  misc_feature 1..21: note = Description of Artificial Sequence: Synthetic oligonucleotide
  source 1..21: mol_type = other DNA
tgtttgcctaatcattgtaat

SEQ ID NO: 44862 - DNA, 21 bp, synthetic construct
  misc_feature 1..21: note = Description of Artificial Sequence: Synthetic oligonucleotide
  source 1..21: mol_type = other DNA
cccaccagccaacaaagaccc

SEQ ID NO: 44863 - DNA, 21 bp, synthetic construct
  misc_feature 1..21: note = Description of Artificial Sequence: Synthetic oligonucleotide
  source 1..21: mol_type = other DNA
cccaacctcaacagcagaggc

SEQ ID NO: 44864 - DNA, 21 bp, synthetic construct
  misc_feature 1..21: note = Description of Artificial Sequence: Synthetic oligonucleotide
  source 1..21: mol_type = other DNA
atgaacagcggcagacacgtc

SEQ ID NO: 44865 - DNA, 21 bp, synthetic construct
  misc_feature 1..21: note = Description of Artificial Sequence: Synthetic oligonucleotide
  source 1..21: mol_type = other DNA
aggaatcagggtgcgttgcag

SEQ ID NO: 44866 - DNA, 21 bp, synthetic construct
  misc_feature 1..21: note = Description of Artificial Sequence: Synthetic oligonucleotide
  source 1..21: mol_type = other DNA
tcggcgtcgcatggtgctctg

SEQ ID NO: 44867 - DNA, 21 bp, synthetic construct
  misc_feature 1..21: note = Description of Artificial Sequence: Synthetic oligonucleotide
  source 1..21: mol_type = other DNA
ggtaagacgaatgtgtctagt

SEQ ID NO: 44868 - DNA, 21 bp, synthetic construct
  misc_feature 1..21: note = Description of Artificial Sequence: Synthetic oligonucleotide
  source 1..21: mol_type = other DNA
ggttttaccggttctcatgtg

SEQ ID NO: 44869 - DNA, 21 bp, synthetic construct
  misc_feature 1..21: note = Description of Artificial Sequence: Synthetic oligonucleotide
  source 1..21: mol_type = other DNA
agcctcggcagcagacccagc

SEQ ID NO: 44870 - DNA, 21 bp, synthetic construct
  misc_feature 1..21: note = Description of Artificial Sequence: Synthetic oligonucleotide
  source 1..21: mol_type = other DNA
aacagaaacggcttcaacaac

SEQ ID NO: 44871 - DNA, 21 bp, synthetic construct
  misc_feature 1..21: note = Description of Artificial Sequence: Synthetic oligonucleotide
  source 1..21: mol_type = other DNA
agctacgtcggcaccaccgcc

SEQ ID NO: 44872 - DNA, 21 bp, synthetic construct
  misc_feature 1..21: note = Description of Artificial Sequence: Synthetic oligonucleotide
  source 1..21: mol_type = other DNA
gtcaaccaaagcggcttcagc

SEQ ID NO: 44873 - DNA, 21 bp, synthetic construct
  misc_feature 1..21: note = Description of Artificial Sequence: Synthetic oligonucleotide
  source 1..21: mol_type = other DNA
cagccttctcaggggcatagt

SEQ ID NO: 44874 - DNA, 21 bp, synthetic construct
  misc_feature 1..21: note = Description of Artificial Sequence: Synthetic oligonucleotide
  source 1..21: mol_type = other DNA
aacggttctggaaagaatcaa

SEQ ID NO: 44875 - DNA, 21 bp, synthetic construct
  misc_feature 1..21: note = Description of Artificial Sequence: Synthetic oligonucleotide
  source 1..21: mol_type = other DNA
agcagaaacggcggccccctc

SEQ ID NO: 44876 - DNA, 21 bp, synthetic construct
  misc_feature 1..21: note = Description of Artificial Sequence: Synthetic oligonucleotide
  source 1..21: mol_type = other DNA
gaaggcatcagcagcatcagc

SEQ ID NO: 44877 - DNA, 21 bp, synthetic construct
  misc_feature 1..21: note = Description of Artificial Sequence: Synthetic oligonucleotide
  source 1..21: mol_type = other DNA
ccctacaacagcaaagccagc

SEQ ID NO: 44878 - DNA, 21 bp, synthetic construct
  misc_feature 1..21: note = Description of Artificial Sequence: Synthetic oligonucleotide
  source 1..21: mol_type = other DNA
gcggtgacgggtgcgagtggt

SEQ ID NO: 44879 - DNA, 21 bp, synthetic construct
  misc_feature 1..21: note = Description of Artificial Sequence: Synthetic oligonucleotide
  source 1..21: mol_type = other DNA
tcggtgacgccgcatgttacg

SEQ ID NO: 44880 - DNA, 21 bp, synthetic construct
  misc_feature 1..21: note = Description of Artificial Sequence: Synthetic oligonucleotide
  source 1..21: mol_type = other DNA
ccggtgagtggggcgactatt

SEQ ID NO: 44881 - DNA, 21 bp, synthetic construct
  misc_feature 1..21: note = Description of Artificial Sequence: Synthetic oligonucleotide
  source 1..21: mol_type = other DNA
gggagtcgtgataattcgcgt

SEQ ID NO: 44882 - DNA, 21 bp, synthetic construct
  misc_feature 1..21: note = Description of Artificial Sequence: Synthetic oligonucleotide
  source 1..21: mol_type = other DNA
agagaacccgccagaggcgac

SEQ ID NO: 44883 - DNA, 21 bp, synthetic construct
  misc_feature 1..21: note = Description of Artificial Sequence: Synthetic oligonucleotide
  source 1..21: mol_type = other DNA
cccagaagccaacccgtcccc

SEQ ID NO: 44884 - DNA, 21 bp, synthetic construct
  misc_feature 1..21: note = Description of Artificial Sequence: Synthetic oligonucleotide
  source 1..21: mol_type = other DNA
acgtctagtggtcattctgtt

SEQ ID NO: 44885 - DNA, 21 bp, synthetic construct
  misc_feature 1..21: note = Description of Artificial Sequence: Synthetic oligonucleotide
  source 1..21: mol_type = other DNA
gccgacctcaccagaagcagc

SEQ ID NO: 44886 - DNA, 21 bp, synthetic construct
  misc_feature 1..21: note = Description of Artificial Sequence: Synthetic oligonucleotide
  source 1..21: mol_type = other DNA
ctcggccccggcaaaaacacc

SEQ ID NO: 44887 - DNA, 21 bp, synthetic construct
  misc_feature 1..21: note = Description of Artificial Sequence: Synthetic oligonucleotide
  source 1..21: mol_type = other DNA
tctactttttctccttctaag

SEQ ID NO: 44888 - DNA, 21 bp, synthetic construct
  misc_feature 1..21: note = Description of Artificial Sequence: Synthetic oligonucleotide
  source 1..21: mol_type = other DNA
tctcctggtaataagagtact

SEQ ID NO: 44889 - DNA, 21 bp, synthetic construct
  misc_feature 1..21: note = Description of Artificial Sequence: Synthetic oligonucleotide
  source 1..21: mol_type = other DNA
gatcgtcaggggttgtctggg

SEQ ID NO: 44890 - DNA, 21 bp, synthetic construct
  misc_feature 1..21: note = Description of Artificial Sequence: Synthetic oligonucleotide
  source 1..21: mol_type = other DNA
ttcaacgaacaaagagtcagc

SEQ ID NO: 44891 - DNA, 21 bp, synthetic construct
  misc_feature 1..21: note = Description of Artificial Sequence: Synthetic oligonucleotide
  source 1..21: mol_type = other DNA
cggtcttatgagggtatgcag

SEQ ID NO: 44892 - DNA, 21 bp, synthetic construct
  misc_feature 1..21: note = Description of Artificial Sequence: Synthetic oligonucleotide
  source 1..21: mol_type = other DNA
atccccagcggcgtccacagc

SEQ ID NO: 44893 - DNA, 21 bp, synthetic construct
  misc_feature 1..21: note = Description of Artificial Sequence: Synthetic oligonucleotide
  source 1..21: mol_type = other DNA
gatacgattacttcgaggggt

SEQ ID NO: 44894 - DNA, 21 bp, synthetic construct
  misc_feature 1..21: note = Description of Artificial Sequence: Synthetic oligonucleotide
  source 1..21: mol_type = other DNA
cccagcgtcaacagaaccccc

SEQ ID NO: 44895 - DNA, 21 bp, synthetic construct
  misc_feature 1..21: note = Description of Artificial Sequence: Synthetic oligonucleotide
  source 1..21: mol_type = other DNA
ccggtttcgacgcattcgtct

SEQ ID NO: 44896 - DNA, 21 bp, synthetic construct
  misc_feature 1..21: note = Description of Artificial Sequence: Synthetic oligonucleotide
  source 1..21: mol_type = other DNA
agcagagtcaccagcgtcagc

SEQ ID NO: 44897 - DNA, 21 bp, synthetic construct
  misc_feature 1..21: note = Description of Artificial Sequence: Synthetic oligonucleotide
  source 1..21: mol_type = other DNA
aggtcttctgggggtttgact

SEQ ID NO: 44898 - DNA, 21 bp, synthetic construct
  misc_feature 1..21: note = Description of Artificial Sequence: Synthetic oligonucleotide
  source 1..21: mol_type = other DNA
agcaaaggcctcagcatggtc

SEQ ID NO: 44899 - DNA, 21 bp, synthetic construct
  misc_feature 1..21: note = Description of Artificial Sequence: Synthetic oligonucleotide
  source 1..21: mol_type = other DNA
gataatccgaggcaggcttat

SEQ ID NO: 44900 - DNA, 21 bp, synthetic construct
  misc_feature 1..21: note = Description of Artificial Sequence: Synthetic oligonucleotide
  source 1..21: mol_type = other DNA
gggacgactaattcgcgtaat

SEQ ID NO: 44901 - DNA, 21 bp, synthetic construct
  misc_feature 1..21: note = Description of Artificial Sequence: Synthetic oligonucleotide
  source 1..21: mol_type = other DNA
ggtagttctaggtcgcttggg

SEQ ID NO: 44902 - DNA, 21 bp, synthetic construct
  misc_feature 1..21: note = Description of Artificial Sequence: Synthetic oligonucleotide
  source 1..21: mol_type = other DNA
atgctcccccaaaacggcaga

SEQ ID NO: 44903 - DNA, 21 bp, synthetic construct
  misc_feature 1..21: note = Description of Artificial Sequence: Synthetic oligonucleotide
  source 1..21: mol_type = other DNA
ggtagtaataggaatcctctt

SEQ ID NO: 44904 - DNA, 21 bp, synthetic construct
  misc_feature 1..21: note = Description of Artificial Sequence: Synthetic oligonucleotide
  source 1..21: mol_type = other DNA
agcaccagcagagacgccacc

SEQ ID NO: 44905 - DNA, 21 bp, synthetic construct
  misc_feature 1..21: note = Description of Artificial Sequence: Synthetic oligonucleotide
  source 1..21: mol_type = other DNA
catggttctagttcttttacg

SEQ ID NO: 44906 - DNA, 21 bp, synthetic construct
  misc_feature 1..21: note = Description of Artificial Sequence: Synthetic oligonucleotide
  source 1..21: mol_type = other DNA
agcgacatgagcggccaaaga

SEQ ID NO: 44907 - DNA, 21 bp, synthetic construct
  misc_feature 1..21: note = Description of Artificial Sequence: Synthetic oligonucleotide
  source 1..21: mol_type = other DNA
agaagcggcagcgtcaacccc

SEQ ID NO: 44908 - DNA, 21 bp, synthetic construct
  misc_feature 1..21: note = Description of Artificial Sequence: Synthetic oligonucleotide
  source 1..21: mol_type = other DNA
ggcaccgccgacagacacctc

SEQ ID NO: 44909 - DNA, 21 bp, synthetic construct
  misc_feature 1..21: note = Description of Artificial Sequence: Synthetic oligonucleotide
  source 1..21: mol_type = other DNA
tgcaccagcaaaagcagcagc

SEQ ID NO: 44910 - DNA, 21 bp, synthetic construct
  misc_feature 1..21: note = Description of Artificial Sequence: Synthetic oligonucleotide
  source 1..21: mol_type = other DNA
gaaggcaccagaggcgtcggc

SEQ ID NO: 44911 - DNA, 21 bp, synthetic construct
  misc_feature 1..21: note = Description of Artificial Sequence: Synthetic oligonucleotide
  source 1..21: mol_type = other DNA
cgtgttactaatcagaatgcg

SEQ ID NO: 44912 - DNA, 21 bp, synthetic construct
  misc_feature 1..21: note = Description of Artificial Sequence: Synthetic oligonucleotide
  source 1..21: mol_type = other DNA
agcagaaacgtcaacgccatg

SEQ ID NO: 44913 - DNA, 21 bp, synthetic construct
  misc_feature 1..21: note = Description of Artificial Sequence: Synthetic oligonucleotide
  source 1..21: mol_type = other DNA
gccggcggccccgccaacaga

SEQ ID NO: 44914 - DNA, 21 bp, synthetic construct
  misc_feature 1..21: note = Description of Artificial Sequence: Synthetic oligonucleotide
  source 1..21: mol_type = other DNA
accggcagcggcagcaaccac

SEQ ID NO: 44915 - DNA, 21 bp, synthetic construct
  misc_feature 1..21: note = Description of Artificial Sequence: Synthetic oligonucleotide
  source 1..21: mol_type = other DNA
ggcctccaaagcaaacaactc

SEQ ID NO: 44916 - DNA, 21 bp, synthetic construct
  misc_feature 1..21: note = Description of Artificial Sequence: Synthetic oligonucleotide
  source 1..21: mol_type = other DNA
gctatgactggttcgcatact

SEQ ID NO: 44917 - DNA, 21 bp, synthetic construct
  misc_feature 1..21: note = Description of Artificial Sequence: Synthetic oligonucleotide
  source 1..21: mol_type = other DNA
ccgagtactagtggtgcgatg

SEQ ID NO: 44918 - DNA, 21 bp, synthetic construct
  misc_feature 1..21: note = Description of Artificial Sequence: Synthetic oligonucleotide
  source 1..21: mol_type = other DNA
agcagcgccaaccaccccaga

SEQ ID NO: 44919 - DNA, 21 bp, synthetic construct
  misc_feature 1..21: note = Description of Artificial Sequence: Synthetic oligonucleotide
  source 1..21: mol_type = other DNA
ggccacgtcagccccgccttc

SEQ ID NO: 44920 - DNA, 21 bp, synthetic construct
  misc_feature 1..21: note = Description of Artificial Sequence: Synthetic oligonucleotide
  source 1..21: mol_type = other DNA
agaaacgtcgacaaaagcagc

SEQ ID NO: 44921 - DNA, 21 bp, synthetic construct
  misc_feature 1..21: note = Description of Artificial Sequence: Synthetic oligonucleotide
  source 1..21: mol_type = other DNA
taccccaaaaccaacgtcacc

SEQ ID NO: 44922 - DNA, 21 bp, synthetic construct
  misc_feature 1..21: note = Description of Artificial Sequence: Synthetic oligonucleotide
  source 1..21: mol_type = other DNA
aatcctaatcagtctcttggg

SEQ ID NO: 44923 - DNA, 21 bp, synthetic construct
  misc_feature 1..21: note = Description of Artificial Sequence: Synthetic oligonucleotide
  source 1..21: mol_type = other DNA
gccgtcgacagcaccagagcc

SEQ ID NO: 44924 - DNA, 21 bp, synthetic construct
  misc_feature 1..21: note = Description of Artificial Sequence: Synthetic oligonucleotide
  source 1..21: mol_type = other DNA
gatactagtcgtgctccgggt

SEQ ID NO: 44925 - DNA, 21 bp, synthetic construct
  misc_feature 1..21: note = Description of Artificial Sequence: Synthetic oligonucleotide
  source 1..21: mol_type = other DNA
gccaacaccaccagactcacc

SEQ ID NO: 44926 - DNA, 21 bp, synthetic construct
  misc_feature 1..21: note = Description of Artificial Sequence: Synthetic oligonucleotide
  source 1..21: mol_type = other DNA
gtgccgcatggggctacttct

SEQ ID NO: 44927 - DNA, 21 bp, synthetic construct
  misc_feature 1..21: note = Description of Artificial Sequence: Synthetic oligonucleotide
  source 1..21: mol_type = other DNA
acgtctactagtccgatgaag

SEQ ID NO: 44928 - DNA, 21 bp, synthetic construct
  misc_feature 1..21: note = Description of Artificial Sequence: Synthetic oligonucleotide
  source 1..21: mol_type = other DNA
gaaacccccaacagaagccaa

SEQ ID NO: 44929 - DNA, 21 bp, synthetic construct
  misc_feature 1..21: note = Description of Artificial Sequence: Synthetic oligonucleotide
  source 1..21: mol_type = other DNA
cgttcgaatcctactttggtg

SEQ ID NO: 44930 - DNA, 21 bp, synthetic construct
  misc_feature 1..21: note = Description of Artificial Sequence: Synthetic oligonucleotide
  source 1..21: mol_type = other DNA
acggctacgcagaagggtcag

SEQ ID NO: 44931 - DNA, 21 bp, synthetic construct
  misc_feature 1..21: note = Description of Artificial Sequence: Synthetic oligonucleotide
  source 1..21: mol_type = other DNA
ggtcatagttcgaataatgct

SEQ ID NO: 44932 - DNA, 21 bp, synthetic construct
  misc_feature 1..21: note = Description of Artificial Sequence: Synthetic oligonucleotide
  source 1..21: mol_type = other DNA
ggtggtttgcatgggagtggt

SEQ ID NO: 44933 - DNA, 21 bp, synthetic construct
  misc_feature 1..21: note = Description of Artificial Sequence: Synthetic oligonucleotide
  source 1..21: mol_type = other DNA
ccgaggagtactacgggtggg

SEQ ID NO: 44934 - DNA, 21 bp, synthetic construct
  misc_feature 1..21: note = Description of Artificial Sequence: Synthetic oligonucleotide
  source 1..21: mol_type = other DNA
aatagtgggaagccgaatgcg

SEQ ID NO: 44935 - DNA, 21 bp, synthetic construct
  misc_feature 1..21: note = Description of Artificial Sequence: Synthetic oligonucleotide
  source 1..21: mol_type = other DNA
aatacggtttcgaagtctcag

SEQ ID NO: 44936 - DNA, 21 bp, synthetic construct
  misc_feature 1..21: note = Description of Artificial Sequence: Synthetic oligonucleotide
  source 1..21: mol_type = other DNA
gatgtgaagtctacgcatgcg

SEQ ID NO: 44937 - DNA, 21 bp, synthetic construct
  misc_feature 1..21: note = Description of Artificial Sequence: Synthetic oligonucleotide
  source 1..21: mol_type = other DNA
gctggtactggtagttcgctt

SEQ ID NO: 44938 - DNA, 21 bp, synthetic construct
  misc_feature 1..21: note = Description of Artificial Sequence: Synthetic oligonucleotide
  source 1..21: mol_type = other DNA
accacccacaacatgcaaggc

SEQ ID NO: 44939 - DNA, 21 bp, synthetic construct
  misc_feature 1..21: note = Description of Artificial Sequence: Synthetic oligonucleotide
  source 1..21: mol_type = other DNA
agcagagaaaccgtccccacc

SEQ ID NO: 44940 - DNA, 21 bp, synthetic construct
  misc_feature 1..21: note = Description of Artificial Sequence: Synthetic oligonucleotide
  source 1..21: mol_type = other DNA
cagtcgcattcggggatttct

SEQ ID NO: 44941 - DNA, 21 bp, synthetic construct
  misc_feature 1..21: note = Description of Artificial Sequence: Synthetic oligonucleotide
  source 1..21: mol_type = other DNA
ccgcctaatctgaagttgagt

SEQ ID NO: 44942 - DNA, 21 bp, synthetic construct
  misc_feature 1..21: note = Description of Artificial Sequence: Synthetic oligonucleotide
  source 1..21: mol_type = other DNA
cagcatactacgactaatcag

SEQ ID NO: 44943 - DNA, 21 bp, synthetic construct
  misc_feature 1..21: note = Description of Artificial Sequence: Synthetic oligonucleotide
  source 1..21: mol_type = other DNA
agcaacgaaaccaaaagcagc

SEQ ID NO: 44944 - DNA, 21 bp, synthetic construct
  misc_feature 1..21: note = Description of Artificial Sequence: Synthetic oligonucleotide
  source 1..21: mol_type = other DNA
gagcagggttcgggtaatcat

SEQ ID NO: 44945 - DNA, 21 bp, synthetic construct
  misc_feature 1..21: note = Description of Artificial Sequence: Synthetic oligonucleotide
  source 1..21: mol_type = other DNA
ggcaccgacaacaacaccaga

SEQ ID NO: 44946 - DNA, 21 bp, synthetic construct
  misc_feature 1..21: note = Description of Artificial Sequence: Synthetic oligonucleotide
  source 1..21: mol_type = other DNA
cacggcaccagccccctcaga

SEQ ID NO: 44947 - DNA, 21 bp, synthetic construct
  misc_feature 1..21: note = Description of Artificial Sequence: Synthetic oligonucleotide
  source 1..21: mol_type = other DNA
gctactaattcgactcctagg

SEQ ID NO: 44948 - DNA, 21 bp, synthetic construct
  misc_feature 1..21: note = Description of Artificial Sequence: Synthetic oligonucleotide
  source 1..21: mol_type = other DNA
cagagtaatccgcgtcctggt

SEQ ID NO: 44949 - DNA, 21 bp, synthetic construct
  misc_feature 1..21: note = Description of Artificial Sequence: Synthetic oligonucleotide
  source 1..21: mol_type = other DNA
agttcgttgcagccttttact

SEQ ID NO: 44950 - DNA, 21 bp, synthetic construct
  misc_feature 1..21: note = Description of Artificial Sequence: Synthetic oligonucleotide
  source 1..21: mol_type = other DNA
ggcaccgccagaggcgtcgcc

SEQ ID NO: 44951 - DNA, 21 bp, synthetic construct
  misc_feature 1..21: note = Description of Artificial Sequence: Synthetic oligonucleotide
  source 1..21: mol_type = other DNA
gctgcgagtactgtgccgcgt

SEQ ID NO: 44952 - DNA, 21 bp, synthetic construct
  misc_feature 1..21: note = Description of Artificial Sequence: Synthetic oligonucleotide
  source 1..21: mol_type = other DNA
actggtatgcagagtttgtcg

SEQ ID NO: 44953 - DNA, 21 bp, synthetic construct
  misc_feature 1..21: note = Description of Artificial Sequence: Synthetic oligonucleotide
  source 1..21: mol_type = other DNA
gccagcagcagagaaagcctc

SEQ ID NO: 44954 - DNA, 21 bp, synthetic construct
  misc_feature 1..21: note = Description of Artificial Sequence: Synthetic oligonucleotide
  source 1..21: mol_type = other DNA
cacggcagcggccaaaaccaa

SEQ ID NO: 44955 - DNA, 21 bp, synthetic construct
  misc_feature 1..21: note = Description of Artificial Sequence: Synthetic oligonucleotide
  source 1..21: mol_type = other DNA
agagccggcagcgccgtcgaa

SEQ ID NO: 44956 - DNA, 21 bp, synthetic construct
  misc_feature 1..21: note = Description of Artificial Sequence: Synthetic oligonucleotide
  source 1..21: mol_type = other DNA
ggcagcaccaccagcggcaga

SEQ ID NO: 44957 - DNA, 21 bp, synthetic construct
  misc_feature 1..21: note = Description of Artificial Sequence: Synthetic oligonucleotide
  source 1..21: mol_type = other DNA
gtgcatacgggtcagaatggg

SEQ ID NO: 44958 - DNA, 21 bp, synthetic construct
  misc_feature 1..21: note = Description of Artificial Sequence: Synthetic oligonucleotide
  source 1..21: mol_type = other DNA
cggggtcctgggcataatacg

SEQ ID NO: 44959 - DNA, 21 bp, synthetic construct
  misc_feature 1..21: note = Description of Artificial Sequence: Synthetic oligonucleotide
  source 1..21: mol_type = other DNA
acgcgggatagtcaggttctt

SEQ ID NO: 44960 - DNA, 21 bp, synthetic construct
  misc_feature 1..21: note = Description of Artificial Sequence: Synthetic oligonucleotide
  source 1..21: mol_type = other DNA
cccggcggcgtccccggcagc

SEQ ID NO: 44961 - DNA, 21 bp, synthetic construct
  misc_feature 1..21: note = Description of Artificial Sequence: Synthetic oligonucleotide
  source 1..21: mol_type = other DNA
cattatggtgagactcggaat

SEQ ID NO: 44962 - DNA, 21 bp, synthetic construct
  misc_feature 1..21: note = Description of Artificial Sequence: Synthetic oligonucleotide
  source 1..21: mol_type = other DNA
cacaaaagcggcctcgtcgac

SEQ ID NO: 44963 - DNA, 21 bp, synthetic construct
  misc_feature 1..21: note = Description of Artificial Sequence: Synthetic oligonucleotide
  source 1..21: mol_type = other DNA
gctggtgtgacgactgttaat

SEQ ID NO: 44964 - DNA, 21 bp, synthetic construct
  misc_feature 1..21: note = Description of Artificial Sequence: Synthetic oligonucleotide
  source 1..21: mol_type = other DNA
tacatcaacagccccagcaac

SEQ ID NO: 44965 - DNA, 21 bp, synthetic construct
  misc_feature 1..21: note = Description of Artificial Sequence: Synthetic oligonucleotide
  source 1..21: mol_type = other DNA
tcgcgttctactgggacgctg

SEQ ID NO: 44966 - DNA, 21 bp, synthetic construct
  misc_feature 1..21: note = Description of Artificial Sequence: Synthetic oligonucleotide
  source 1..21: mol_type = other DNA
gctctgaggaatcagagtcag

SEQ ID NO: 44967 - DNA, 21 bp, synthetic construct
  misc_feature 1..21: note = Description of Artificial Sequence: Synthetic oligonucleotide
  source 1..21: mol_type = other DNA
ggggattctaagtctacgtgg

SEQ ID NO: 44968 - DNA, 21 bp, synthetic construct
  misc_feature 1..21: note = Description of Artificial Sequence: Synthetic oligonucleotide
  source 1..21: mol_type = other DNA
gagcctcttcagggttcgcgt

SEQ ID NO: 44969 - DNA, 21 bp, synthetic construct
  misc_feature 1..21: note = Description of Artificial Sequence: Synthetic oligonucleotide
  source 1..21: mol_type = other DNA
gcccacttcagcaccgaaaga

SEQ ID NO: 44970 - DNA, 21 bp, synthetic construct
  misc_feature 1..21: note = Description of Artificial Sequence: Synthetic oligonucleotide
  source 1..21: mol_type = other DNA
ctcgtcagcaaaagcggcacc

SEQ ID NO: 44971 - DNA, 21 bp, synthetic construct
  misc_feature 1..21: note = Description of Artificial Sequence: Synthetic oligonucleotide
  source 1..21: mol_type = other DNA
agcgccaccagcgtccccatc

SEQ ID NO: 44972 - DNA, 21 bp, synthetic construct
  misc_feature 1..21: note = Description of Artificial Sequence: Synthetic oligonucleotide
  source 1..21: mol_type = other DNA
tcgagtccgactaatatggcg

SEQ ID NO: 44973 - DNA, 21 bp, synthetic construct
  misc_feature 1..21: note = Description of Artificial Sequence: Synthetic oligonucleotide
  source 1..21: mol_type = other DNA
cagatttctgcgtcgactagg

SEQ ID NO: 44974 - DNA, 21 bp, synthetic construct
  misc_feature 1..21: note = Description of Artificial Sequence: Synthetic oligonucleotide
  source 1..21: mol_type = other DNA
cgtgatccgaaggcgggtgtt

SEQ ID NO: 44975 - DNA, 21 bp, synthetic construct
  misc_feature 1..21: note = Description of Artificial Sequence: Synthetic oligonucleotide
  source 1..21: mol_type = other DNA
gaaagagccaaaggcagcagc

SEQ ID NO: 44976 - DNA, 21 bp, synthetic construct
  misc_feature 1..21: note = Description of Artificial Sequence: Synthetic oligonucleotide
  source 1..21: mol_type = other DNA
caagccaacaccatcggcaaa

SEQ ID NO: 44977 - DNA, 21 bp, synthetic construct
  misc_feature 1..21: note = Description of Artificial Sequence: Synthetic oligonucleotide
  source 1..21: mol_type = other DNA
atggctctgcagccgaatagg

SEQ ID NO: 44978 - DNA, 21 bp, synthetic construct
  misc_feature 1..21: note = Description of Artificial Sequence: Synthetic oligonucleotide
  source 1..21: mol_type = other DNA
ccttcgtctactccgaagctg

SEQ ID NO: 44979 - DNA, 21 bp, synthetic construct
  misc_feature 1..21: note = Description of Artificial Sequence: Synthetic oligonucleotide
  source 1..21: mol_type = other DNA
tcgggttcgtctcctcctacg

SEQ ID NO: 44980 - DNA, 21 bp, synthetic construct
  misc_feature 1..21: note = Description of Artificial Sequence: Synthetic oligonucleotide
  source 1..21: mol_type = other DNA
caggtgacgggtgcgagtcat

SEQ ID NO: 44981 - DNA, 21 bp, synthetic construct
  misc_feature 1..21: note = Description of Artificial Sequence: Synthetic oligonucleotide
  source 1..21: mol_type = other DNA
agcctcggcagcggcttccaa

SEQ ID NO: 44982 - DNA, 21 bp, synthetic construct
  misc_feature 1..21: note = Description of Artificial Sequence: Synthetic oligonucleotide
  source 1..21: mol_type = other DNA
gtgaatacgtctcatacgaat

SEQ ID NO: 44983 - DNA, 21 bp, synthetic construct
  misc_feature 1..21: note = Description of Artificial Sequence: Synthetic oligonucleotide
  source 1..21: mol_type = other DNA
tatttgacgagtacgtctaat

SEQ ID NO: 44984 - DNA, 21 bp, synthetic construct
  misc_feature 1..21: note = Description of Artificial Sequence: Synthetic oligonucleotide
  source 1..21: mol_type = other DNA
atgctgaatagtcgtacgtct

SEQ ID NO: 44985 - DNA, 21 bp, synthetic construct
  misc_feature 1..21: note = Description of Artificial Sequence: Synthetic oligonucleotide
  source 1..21: mol_type = other DNA
ccttttggtgctggtcgtcct

SEQ ID NO: 44986 - DNA, 21 bp, synthetic construct
  misc_feature 1..21: note = Description of Artificial Sequence: Synthetic oligonucleotide
  source 1..21: mol_type = other DNA
cccctccccaaaaacagcagc

SEQ ID NO: 44987 - DNA, 21 bp, synthetic construct
  misc_feature 1..21: note = Description of Artificial Sequence: Synthetic oligonucleotide
  source 1..21: mol_type = other DNA
cacgccaaaagcagcagcatg

SEQ ID NO: 44988 - DNA, 21 bp, synthetic construct
  misc_feature 1..21: note = Description of Artificial Sequence: Synthetic oligonucleotide
  source 1..21: mol_type = other DNA
accaacgccgccagagacagc

SEQ ID NO: 44989 - DNA, 21 bp, synthetic construct
  misc_feature 1..21: note = Description of Artificial Sequence: Synthetic oligonucleotide
  source 1..21: mol_type = other DNA
ggtcttcagactccgcctcgt

SEQ ID NO: 44990 - DNA, 21 bp, synthetic construct
  misc_feature 1..21: note = Description of Artificial Sequence: Synthetic oligonucleotide
  source 1..21: mol_type = other DNA
ggccacgacggccaaagcaga

SEQ ID NO: 44991 - DNA, 21 bp, synthetic construct
  misc_feature 1..21: note = Description of Artificial Sequence: Synthetic oligonucleotide
  source 1..21: mol_type = other DNA
gccaccagccaactccccaga

SEQ ID NO: 44992 - DNA, 21 bp, synthetic construct
  misc_feature 1..21: note = Description of Artificial Sequence: Synthetic oligonucleotide
  source 1..21: mol_type = other DNA
agcaccacccccggcctcaaa

SEQ ID NO: 44993 - DNA, 21 bp, synthetic construct
  misc_feature 1..21: note = Description of Artificial Sequence: Synthetic oligonucleotide
  source 1..21: mol_type = other DNA
agggctactagtcgtgaggct

SEQ ID NO: 44994 - DNA, 21 bp, synthetic construct
  misc_feature 1..21: note = Description of Artificial Sequence: Synthetic oligonucleotide
  source 1..21: mol_type = other DNA
ggccccgtcaacgcccacagc

SEQ ID NO: 44995 - DNA, 21 bp, synthetic construct
  misc_feature 1..21: note = Description of Artificial Sequence: Synthetic oligonucleotide
  source 1..21: mol_type = other DNA
agtgcgaataataagtcgggg

SEQ ID NO: 44996 - DNA, 21 bp, synthetic construct
  misc_feature 1..21: note = Description of Artificial Sequence: Synthetic oligonucleotide
  source 1..21: mol_type = other DNA
tcgcagcctggttctaatcat

SEQ ID NO: 44997 - DNA, 21 bp, synthetic construct
  misc_feature 1..21: note = Description of Artificial Sequence: Synthetic oligonucleotide
  source 1..21: mol_type = other DNA
ggcagcatcagcaccgcccac

SEQ ID NO: 44998 - DNA, 21 bp, synthetic construct
  misc_feature 1..21: note = Description of Artificial Sequence: Synthetic oligonucleotide
  source 1..21: mol_type = other DNA
gctggtacgaattctaggcag

SEQ ID NO: 44999 - DNA, 21 bp, synthetic construct
  misc_feature 1..21: note = Description of Artificial Sequence: Synthetic oligonucleotide
  source 1..21: mol_type = other DNA
aatgcgcagggtactgctaag

SEQ ID NO: 45000 - DNA, 21 bp, synthetic construct
  misc_feature 1..21: note = Description of Artificial Sequence: Synthetic oligonucleotide
  source 1..21: mol_type = other DNA
atgtcgacttcttcttctcgt

SEQ ID NO: 45001 - DNA, 21 bp, synthetic construct
  misc_feature 1..21: note = Description of Artificial Sequence: Synthetic oligonucleotide
  source 1..21: mol_type = other DNA
accagaaccgccggcgtcgac

SEQ ID NO: 45002 - DNA, 21 bp, synthetic construct
  misc_feature 1..21: note = Description of Artificial Sequence: Synthetic oligonucleotide
  source 1..21: mol_type = other DNA
ttcggccaacaagccggcatg

SEQ ID NO: 45003 - DNA, 21 bp, synthetic construct
  misc_feature 1..21: note = Description of Artificial Sequence: Synthetic oligonucleotide
  source 1..21: mol_type = other DNA
gacagcagaaacaacatgacc

SEQ ID NO: 45004 - DNA, 21 bp, synthetic construct
  misc_feature 1..21: note = Description of Artificial Sequence: Synthetic oligonucleotide
  source 1..21: mol_type = other DNA
caaaacctccccaaagccagc

SEQ ID NO: 45005 - DNA, 21 bp, synthetic construct
  misc_feature 1..21: note = Description of Artificial Sequence: Synthetic oligonucleotide
  source 1..21: mol_type = other DNA
gctgctcattcgactatgaat

SEQ ID NO: 45006 - DNA, 21 bp, synthetic construct
  misc_feature 1..21: note = Description of Artificial Sequence: Synthetic oligonucleotide
  source 1..21: mol_type = other DNA
gttccgcataatcattcgttg

SEQ ID NO: 45007 - DNA, 21 bp, synthetic construct
  misc_feature 1..21: note = Description of Artificial Sequence: Synthetic oligonucleotide
  source 1..21: mol_type = other DNA
gggatgggtaatgatccgcgg

SEQ ID NO: 45008 - DNA, 21 bp, synthetic construct
  misc_feature 1..21: note = Description of Artificial Sequence: Synthetic oligonucleotide
  source 1..21: mol_type = other DNA
agcagccccagcagaagcagc

SEQ ID NO: 45009 - DNA, 21 bp, synthetic construct
  misc_feature 1..21: note = Description of Artificial Sequence: Synthetic oligonucleotide
  source 1..21: mol_type = other DNA
cccggcagcggcagcaacaac

SEQ ID NO: 45010 - DNA, 21 bp, synthetic construct
  misc_feature 1..21: note = Description of Artificial Sequence: Synthetic oligonucleotide
  source 1..21: mol_type = other DNA
acgactttgccgtctagtaag

SEQ ID NO: 45011 - DNA, 21 bp, synthetic construct
  misc_feature 1..21: note = Description of Artificial Sequence: Synthetic oligonucleotide
  source 1..21: mol_type = other DNA
gtcagagaaagcagaagcagc

SEQ ID NO: 45012 - DNA, 21 bp, synthetic construct
  misc_feature 1..21: note = Description of Artificial Sequence: Synthetic oligonucleotide
  source 1..21: mol_type = other DNA
tcgtcgacggtgaagagtggt

SEQ ID NO: 45013 - DNA, 21 bp, synthetic construct
  misc_feature 1..21: note = Description of Artificial Sequence: Synthetic oligonucleotide
  source 1..21: mol_type = other DNA
accagcagcggcaacctcagc

SEQ ID NO: 45014 - DNA, 21 bp, synthetic construct
  misc_feature 1..21: note = Description of Artificial Sequence: Synthetic oligonucleotide
  source 1..21: mol_type = other DNA
accatgagcaccagacaaagc

SEQ ID NO: 45015 - DNA, 21 bp, synthetic construct
  misc_feature 1..21: note = Description of Artificial Sequence: Synthetic oligonucleotide
  source 1..21: mol_type = other DNA
agcaccctcaacgccggcgcc

SEQ ID NO: 45016 - DNA, 21 bp, synthetic construct
  misc_feature 1..21: note = Description of Artificial Sequence: Synthetic oligonucleotide
  source 1..21: mol_type = other DNA
cacctccacgccagccccgcc

SEQ ID NO: 45017 - DNA, 21 bp, synthetic construct
  misc_feature 1..21: note = Description of Artificial Sequence: Synthetic oligonucleotide
  source 1..21: mol_type = other DNA
ggccccgccgtcaccaacaga

SEQ ID NO: 45018 - DNA, 21 bp, synthetic construct
  misc_feature 1..21: note = Description of Artificial Sequence: Synthetic oligonucleotide
  source 1..21: mol_type = other DNA
gcgaatggtagtggtgttggg

SEQ ID NO: 45019 - DNA, 21 bp, synthetic construct
  misc_feature 1..21: note = Description of Artificial Sequence: Synthetic oligonucleotide
  source 1..21: mol_type = other DNA
agcgccctcatgaacaacggc

SEQ ID NO: 45020 - DNA, 21 bp, synthetic construct
  misc_feature 1..21: note = Description of Artificial Sequence: Synthetic oligonucleotide
  source 1..21: mol_type = other DNA
agccaagtcagcaaaccccaa

SEQ ID NO: 45021 - DNA, 21 bp, synthetic construct
  misc_feature 1..21: note = Description of Artificial Sequence: Synthetic oligonucleotide
  source 1..21: mol_type = other DNA
ccttctactcagtcgagttct

SEQ ID NO: 45022 - DNA, 21 bp, synthetic construct
  misc_feature 1..21: note = Description of Artificial Sequence: Synthetic oligonucleotide
  source 1..21: mol_type = other DNA
aacggcttcaacagcaacaac

SEQ ID NO: 45023 - DNA, 21 bp, synthetic construct
  misc_feature 1..21: note = Description of Artificial Sequence: Synthetic oligonucleotide
  source 1..21: mol_type = other DNA
agcctcagcaaaagccaaagc

SEQ ID NO: 45024 - DNA, 21 bp, synthetic construct
  misc_feature 1..21: note = Description of Artificial Sequence: Synthetic oligonucleotide
  source 1..21: mol_type = other DNA
agccaacaaagccccagcatg

SEQ ID NO: 45025 - DNA, 21 bp, synthetic construct
  misc_feature 1..21: note = Description of Artificial Sequence: Synthetic oligonucleotide
  source 1..21: mol_type = other DNA
caggtgcatggtaagactcag

SEQ ID NO: 45026 - DNA, 21 bp, synthetic construct
  misc_feature 1..21: note = Description of Artificial Sequence: Synthetic oligonucleotide
  source 1..21: mol_type = other DNA
ggtcaggcttctcatatgaag

SEQ ID NO: 45027 - DNA, 21 bp, synthetic construct
  misc_feature 1..21: note = Description of Artificial Sequence: Synthetic oligonucleotide
  source 1..21: mol_type = other DNA
gccccccacagcgccgccaac

SEQ ID NO: 45028 - DNA, 21 bp, synthetic construct
  misc_feature 1..21: note = Description of Artificial Sequence: Synthetic oligonucleotide
  source 1..21: mol_type = other DNA
cacgccaacaacaaactcatg

SEQ ID NO: 45029 - DNA, 21 bp, synthetic construct
  misc_feature 1..21: note = Description of Artificial Sequence: Synthetic oligonucleotide
  source 1..21: mol_type = other DNA
agcgacatcaacagaagcacc

SEQ ID NO: 45030 - DNA, 21 bp, synthetic construct
  misc_feature 1..21: note = Description of Artificial Sequence: Synthetic oligonucleotide
  source 1..21: mol_type = other DNA
ggccaaaacacccacctcacc

SEQ ID NO: 45031 - DNA, 21 bp, synthetic construct
  misc_feature 1..21: note = Description of Artificial Sequence: Synthetic oligonucleotide
  source 1..21: mol_type = other DNA
agtgtttctactaagagtgct

SEQ ID NO: 45032 - DNA, 21 bp, synthetic construct
  misc_feature 1..21: note = Description of Artificial Sequence: Synthetic oligonucleotide
  source 1..21: mol_type = other DNA
tcgaaggttactgcgcagtct

SEQ ID NO: 45033 - DNA, 21 bp, synthetic construct
  misc_feature 1..21: note = Description of Artificial Sequence: Synthetic oligonucleotide
  source 1..21: mol_type = other DNA
agccacaacagcaaagacagc

SEQ ID NO: 45034 - DNA, 21 bp, synthetic construct
  misc_feature 1..21: note = Description of Artificial Sequence: Synthetic oligonucleotide
  source 1..21: mol_type = other DNA
gtcagcagcaacgccagcatg

SEQ ID NO: 45035 - DNA, 21 bp, synthetic construct
  misc_feature 1..21: note = Description of Artificial Sequence: Synthetic oligonucleotide
  source 1..21: mol_type = other DNA
attaagccgtcttcttcggct

SEQ ID NO: 45036 - DNA, 21 bp, synthetic construct
  misc_feature 1..21: note = Description of Artificial Sequence: Synthetic oligonucleotide
  source 1..21: mol_type = other DNA
ctcgtccacaaaggccccgtc

SEQ ID NO: 45037 - DNA, 21 bp, synthetic construct
  misc_feature 1..21: note = Description of Artificial Sequence: Synthetic oligonucleotide
  source 1..21: mol_type = other DNA
cctcctgtgacgactcgtcct

SEQ ID NO: 45038 - DNA, 21 bp, synthetic construct
  misc_feature 1..21: note = Description of Artificial Sequence: Synthetic oligonucleotide
  source 1..21: mol_type = other DNA
agcacccaccaccccgccagc

SEQ ID NO: 45039 - DNA, 21 bp, synthetic construct
  misc_feature 1..21: note = Description of Artificial Sequence: Synthetic oligonucleotide
  source 1..21: mol_type = other DNA
tcgtcgagtcctaatgttaag

SEQ ID NO: 45040 - DNA, 21 bp, synthetic construct
  misc_feature 1..21: note = Description of Artificial Sequence: Synthetic oligonucleotide
  source 1..21: mol_type = other DNA
gcccaaaccaaaggcacccaa

SEQ ID NO: 45041 - DNA, 21 bp, synthetic construct
  misc_feature 1..21: note = Description of Artificial Sequence: Synthetic oligonucleotide
  source 1..21: mol_type = other DNA
agtactactgggggggctagt

SEQ ID NO: 45042 - DNA, 21 bp, synthetic construct
  misc_feature 1..21: note = Description of Artificial Sequence: Synthetic oligonucleotide
  source 1..21: mol_type = other DNA
gtcaacatgagaaacaccatg

SEQ ID NO: 45043 - DNA, 21 bp, synthetic construct
  misc_feature 1..21: note = Description of Artificial Sequence: Synthetic oligonucleotide
  source 1..21: mol_type = other DNA
tgcggcagacccctccccgcc

SEQ ID NO: 45044 - DNA, 21 bp, synthetic construct
  misc_feature 1..21: note = Description of Artificial Sequence: Synthetic oligonucleotide
  source 1..21: mol_type = other DNA
ggcaccggcaccaccttcaga

SEQ ID NO: 45045 - DNA, 21 bp, synthetic construct
  misc_feature 1..21: note = Description of Artificial Sequence: Synthetic oligonucleotide
  source 1..21: mol_type = other DNA
aacaccacccccagcagaggc

SEQ ID NO: 45046 - DNA, 21 bp, synthetic construct
  misc_feature 1..21: note = Description of Artificial Sequence: Synthetic oligonucleotide
  source 1..21: mol_type = other DNA
ggccacgtcaacgcccacgtc

SEQ ID NO: 45047 - DNA, 21 bp, synthetic construct
  misc_feature 1..21: note = Description of Artificial Sequence: Synthetic oligonucleotide
  source 1..21: mol_type = other DNA
aacaccaacggcagccaaaga

SEQ ID NO: 45048 - DNA, 21 bp, synthetic construct
  misc_feature 1..21: note = Description of Artificial Sequence: Synthetic oligonucleotide
  source 1..21: mol_type = other DNA
gcgtctcttcgggagtcgcgt

SEQ ID NO: 45049 - DNA, 21 bp, synthetic construct
  misc_feature 1..21: note = Description of Artificial Sequence: Synthetic oligonucleotide
  source 1..21: mol_type = other DNA
ggcagcggcaacaaagtcaac

SEQ ID NO: 45050 - DNA, 21 bp, synthetic construct
  misc_feature 1..21: note = Description of Artificial Sequence: Synthetic oligonucleotide
  source 1..21: mol_type = other DNA
atgcagactagtcagtcgact

SEQ ID NO: 45051 - DNA, 21 bp, synthetic construct
  misc_feature 1..21: note = Description of Artificial Sequence: Synthetic oligonucleotide
  source 1..21: mol_type = other DNA
agtagttcggcgcctcgtctt

SEQ ID NO: 45052 - DNA, 21 bp, synthetic construct
  misc_feature 1..21: note = Description of Artificial Sequence: Synthetic oligonucleotide
  source 1..21: mol_type = other DNA
atcccccacgccggcaccgcc

SEQ ID NO: 45053 - DNA, 21 bp, synthetic construct
  misc_feature 1..21: note = Description of Artificial Sequence: Synthetic oligonucleotide
  source 1..21: mol_type = other DNA
agagccagccaaagcgtcggc

SEQ ID NO: 45054 - DNA, 21 bp, synthetic construct
  misc_feature 1..21: note = Description of Artificial Sequence: Synthetic oligonucleotide
  source 1..21: mol_type = other DNA
gccaccaacaacggcagcaaa

SEQ ID NO: 45055 - DNA, 21 bp, synthetic construct
  misc_feature 1..21: note = Description of Artificial Sequence: Synthetic oligonucleotide
  source 1..21: mol_type = other DNA
accgtcaccaacgccgccaga

SEQ ID NO: 45056 - DNA, 21 bp, synthetic construct
  misc_feature 1..21: note = Description of Artificial Sequence: Synthetic oligonucleotide
  source 1..21: mol_type = other DNA
agcagcggcctcagcagcagc

SEQ ID NO: 45057 - DNA, 21 bp, synthetic construct
  misc_feature 1..21: note = Description of Artificial Sequence: Synthetic oligonucleotide
  source 1..21: mol_type = other DNA
gaccccctcagacacagcgtc

SEQ ID NO: 45058 - DNA, 21 bp, synthetic construct
  misc_feature 1..21: note = Description of Artificial Sequence: Synthetic oligonucleotide
  source 1..21: mol_type = other DNA
ggcgccatcagcaacgaacac

SEQ ID NO: 45059 - DNA, 21 bp, synthetic construct
  misc_feature 1..21: note = Description of Artificial Sequence: Synthetic oligonucleotide
  source 1..21: mol_type = other DNA
aacagagtcgaacacacccaa

SEQ ID NO: 45060 - DNA, 21 bp, synthetic construct
  misc_feature 1..21: note = Description of Artificial Sequence: Synthetic oligonucleotide
  source 1..21: mol_type = other DNA
gagcgtacgccgcctaggatt

SEQ ID NO: 45061 - DNA, 21 bp, synthetic construct
  misc_feature 1..21: note = Description of Artificial Sequence: Synthetic oligonucleotide
  source 1..21: mol_type = other DNA
atgcccctcaaaccccacctc

SEQ ID NO: 45062 - DNA, 21 bp, synthetic construct
  misc_feature 1..21: note = Description of Artificial Sequence: Synthetic oligonucleotide
  source 1..21: mol_type = other DNA
ggtgataagactcaggcgatg

SEQ ID NO: 45063 - DNA, 21 bp, synthetic construct
  misc_feature 1..21: note = Description of Artificial Sequence: Synthetic oligonucleotide
  source 1..21: mol_type = other DNA
tcgactaatcctgcgaatcgg

SEQ ID NO: 45064 - DNA, 21 bp, synthetic construct
  misc_feature 1..21: note = Description of Artificial Sequence: Synthetic oligonucleotide
  source 1..21: mol_type = other DNA
accccccaccaaagaagcagc

SEQ ID NO: 45065 - DNA, 21 bp, synthetic construct
  misc_feature 1..21: note = Description of Artificial Sequence: Synthetic oligonucleotide
  source 1..21: mol_type = other DNA
gcgcaggttgataagcggagt

SEQ ID NO: 45066 - DNA, 21 bp, synthetic construct
  misc_feature 1..21: note = Description of Artificial Sequence: Synthetic oligonucleotide
  source 1..21: mol_type = other DNA
cgttcttcggatcggagtgcg

SEQ ID NO: 45067 - DNA, 21 bp, synthetic construct
  misc_feature 1..21: note = Description of Artificial Sequence: Synthetic oligonucleotide
  source 1..21: mol_type = other DNA
atgtcgcgtctgccgtctacg

SEQ ID NO: 45068 - DNA, 21 bp, synthetic construct
  misc_feature 1..21: note = Description of Artificial Sequence: Synthetic oligonucleotide
  source 1..21: mol_type = other DNA
accaaatacgaaggctacacc

SEQ ID NO: 45069 - DNA, 21 bp, synthetic construct
  misc_feature 1..21: note = Description of Artificial Sequence: Synthetic oligonucleotide
  source 1..21: mol_type = other DNA
cgggatggtgctcatcttagg

SEQ ID NO: 45070 - DNA, 21 bp, synthetic construct
  misc_feature 1..21: note = Description of Artificial Sequence: Synthetic oligonucleotide
  source 1..21: mol_type = other DNA
tatggttcgcgtccgccttct

SEQ ID NO: 45071 - DNA, 21 bp, synthetic construct
  misc_feature 1..21: note = Description of Artificial Sequence: Synthetic oligonucleotide
  source 1..21: mol_type = other DNA
aggaatgattctcgtccgccg

SEQ ID NO: 45072 - DNA, 21 bp, synthetic construct
  misc_feature 1..21: note = Description of Artificial Sequence: Synthetic oligonucleotide
  source 1..21: mol_type = other DNA
ggcggcaaccccagcggcagc

SEQ ID NO: 45073 - DNA, 21 bp, synthetic construct
  misc_feature 1..21: note = Description of Artificial Sequence: Synthetic oligonucleotide
  source 1..21: mol_type = other DNA
tctcttagtaagcaggcggcg

SEQ ID NO: 45074 - DNA, 21 bp, synthetic construct
  misc_feature 1..21: note = Description of Artificial Sequence: Synthetic oligonucleotide
  source 1..21: mol_type = other DNA
gctactggtcgttcgccgaat

SEQ ID NO: 45075 - DNA, 21 bp, synthetic construct
  misc_feature 1..21: note = Description of Artificial Sequence: Synthetic oligonucleotide
  source 1..21: mol_type = other DNA
gtgggtggtggtcgtgataat

SEQ ID NO: 45076 - DNA, 21 bp, synthetic construct
  misc_feature 1..21: note = Description of Artificial Sequence: Synthetic oligonucleotide
  source 1..21: mol_type = other DNA
tcttcgcagcagaaggcttct

SEQ ID NO: 45077 - DNA, 21 bp, synthetic construct
  misc_feature 1..21: note = Description of Artificial Sequence: Synthetic oligonucleotide
  source 1..21: mol_type = other DNA
aacagaagcaacaacagcgtc

SEQ ID NO: 45078 - DNA, 21 bp, synthetic construct
  misc_feature 1..21: note = Description of Artificial Sequence: Synthetic oligonucleotide
  source 1..21: mol_type = other DNA
tcgaggggggatggtgtgacg

SEQ ID NO: 45079 - DNA, 21 bp, synthetic construct
  misc_feature 1..21: note = Description of Artificial Sequence: Synthetic oligonucleotide
  source 1..21: mol_type = other DNA
gccctcgccaacccccaaacc

SEQ ID NO: 45080 - DNA, 21 bp, synthetic construct
  misc_feature 1..21: note = Description of Artificial Sequence: Synthetic oligonucleotide
  source 1..21: mol_type = other DNA
attcctgggcatcctactgcg

SEQ ID NO: 45081 - DNA, 21 bp, synthetic construct
  misc_feature 1..21: note = Description of Artificial Sequence: Synthetic oligonucleotide
  source 1..21: mol_type = other DNA
ggcttccccagcggcaccaga

SEQ ID NO: 45082 - DNA, 21 bp, synthetic construct
  misc_feature 1..21: note = Description of Artificial Sequence: Synthetic oligonucleotide
  source 1..21: mol_type = other DNA
cccaccaccctcaaacacgac

SEQ ID NO: 45083 - DNA, 21 bp, synthetic construct
  misc_feature 1..21: note = Description of Artificial Sequence: Synthetic oligonucleotide
  source 1..21: mol_type = other DNA
agcatccccagcaccgtcaga

SEQ ID NO: 45084 - DNA, 21 bp, synthetic construct
  misc_feature 1..21: note = Description of Artificial Sequence: Synthetic oligonucleotide
  source 1..21: mol_type = other DNA
aacagactccccgccaccaaa

SEQ ID NO: 45085 - DNA, 21 bp, synthetic construct
  misc_feature 1..21: note = Description of Artificial Sequence: Synthetic oligonucleotide
  source 1..21: mol_type = other DNA
agcgacaacaaaggcagcgtc

SEQ ID NO: 45086 - DNA, 21 bp, synthetic construct
  misc_feature 1..21: note = Description of Artificial Sequence: Synthetic oligonucleotide
  source 1..21: mol_type = other DNA
atggctacgtcgacggttaag

SEQ ID NO: 45087 - DNA, 21 bp, synthetic construct
  misc_feature 1..21: note = Description of Artificial Sequence: Synthetic oligonucleotide
  source 1..21: mol_type = other DNA
tacaacggcggcaacagaagc

SEQ ID NO: 45088 - DNA, 21 bp, synthetic construct
  misc_feature 1..21: note = Description of Artificial Sequence: Synthetic oligonucleotide
  source 1..21: mol_type = other DNA
ggcaccagcctcaaaatgagc

SEQ ID NO: 45089 - DNA, 21 bp, synthetic construct
  misc_feature 1..21: note = Description of Artificial Sequence: Synthetic oligonucleotide
  source 1..21: mol_type = other DNA
ctcctcaacagcaccggcatg

SEQ ID NO: 45090 - DNA, 21 bp, synthetic construct
  misc_feature 1..21: note = Description of Artificial Sequence: Synthetic oligonucleotide
  source 1..21: mol_type = other DNA
tttatgggttcgccgacgacg

SEQ ID NO: 45091 - DNA, 21 bp, synthetic construct
  misc_feature 1..21: note = Description of Artificial Sequence: Synthetic oligonucleotide
  source 1..21: mol_type = other DNA
agcggcagcgaacacctcaga

SEQ ID NO: 45092 - DNA, 21 bp, synthetic construct
  misc_feature 1..21: note = Description of Artificial Sequence: Synthetic oligonucleotide
  source 1..21: mol_type = other DNA
ggcaacaccaaaaacggcatc

SEQ ID NO: 45093 - DNA, 21 bp, synthetic construct
  misc_feature 1..21: note = Description of Artificial Sequence: Synthetic oligonucleotide
  source 1..21: mol_type = other DNA
attcgttcgacttctggtggg

SEQ ID NO: 45094 - DNA, 21 bp, synthetic construct
  misc_feature 1..21: note = Description of Artificial Sequence: Synthetic oligonucleotide
  source 1..21: mol_type = other DNA
agtggtgtggtgaagtctagt

SEQ ID NO: 45095 - DNA, 21 bp, synthetic construct
  misc_feature 1..21: note = Description of Artificial Sequence: Synthetic oligonucleotide
  source 1..21: mol_type = other DNA
tcgagtgcggggacttatact

SEQ ID NO: 45096 - DNA, 21 bp, synthetic construct
  misc_feature 1..21: note = Description of Artificial Sequence: Synthetic oligonucleotide
  source 1..21: mol_type = other DNA
gcccaacaaagagcccaagcc

SEQ ID NO: 45097 - DNA, 21 bp, synthetic construct
  misc_feature 1..21: note = Description of Artificial Sequence: Synthetic oligonucleotide
  source 1..21: mol_type = other DNA
tcttcgccgactcgtagtttg

SEQ ID NO: 45098 - DNA, 21 bp, synthetic construct
  misc_feature 1..21: note = Description of Artificial Sequence: Synthetic oligonucleotide
  source 1..21: mol_type = other DNA
tggggtaatgagctgcgtcgg

SEQ ID NO: 45099 - DNA, 21 bp, synthetic construct
  misc_feature 1..21: note = Description of Artificial Sequence: Synthetic oligonucleotide
  source 1..21: mol_type = other DNA
cccctcagcaaaagcgccctc

SEQ ID NO: 45100 - DNA, 21 bp, synthetic construct
  misc_feature 1..21: note = Description of Artificial Sequence: Synthetic oligonucleotide
  source 1..21: mol_type = other DNA
ccgatttcgagtaagattcat

SEQ ID NO: 45101 - DNA, 21 bp, synthetic construct
  misc_feature 1..21: note = Description of Artificial Sequence: Synthetic oligonucleotide
  source 1..21: mol_type = other DNA
accggcaacaaaggcggcgtc

SEQ ID NO: 45102 - DNA, 21 bp, synthetic construct
  misc_feature 1..21: note = Description of Artificial Sequence: Synthetic oligonucleotide
  source 1..21: mol_type = other DNA
aggactgtgaatagtgctaat

SEQ ID NO: 45103 - DNA, 21 bp, synthetic construct
  misc_feature 1..21: note = Description of Artificial Sequence: Synthetic oligonucleotide
  source 1..21: mol_type = other DNA
accggcatcgaaagacccatg

SEQ ID NO: 45104 - DNA, 21 bp, synthetic construct
  misc_feature 1..21: note = Description of Artificial Sequence: Synthetic oligonucleotide
  source 1..21: mol_type = other DNA
cagcttagtggggcgcgtagt

SEQ ID NO: 45105 - DNA, 21 bp, synthetic construct
  misc_feature 1..21: note = Description of Artificial Sequence: Synthetic oligonucleotide
  source 1..21: mol_type = other DNA
agaagccccagcaccaacccc

SEQ ID NO: 45106 - DNA, 21 bp, synthetic construct
  misc_feature 1..21: note = Description of Artificial Sequence: Synthetic oligonucleotide
  source 1..21: mol_type = other DNA
cacgacagaggccaaaacggc

SEQ ID NO: 45107 - DNA, 21 bp, synthetic construct
  misc_feature 1..21: note = Description of Artificial Sequence: Synthetic oligonucleotide
  source 1..21: mol_type = other DNA
gtgtctaattcgccttcgagg

SEQ ID NO: 45108 - DNA, 21 bp, synthetic construct
  misc_feature 1..21: note = Description of Artificial Sequence: Synthetic oligonucleotide
  source 1..21: mol_type = other DNA
cacagcagcagacccctcgaa

SEQ ID NO: 45109 - DNA, 21 bp, synthetic construct
  misc_feature 1..21: note = Description of Artificial Sequence: Synthetic oligonucleotide
  source 1..21: mol_type = other DNA
cgtaagccggggtctatgatg

SEQ ID NO: 45110 - DNA, 21 bp, synthetic construct
  misc_feature 1..21: note = Description of Artificial Sequence: Synthetic oligonucleotide
  source 1..21: mol_type = other DNA
aattcggttggtcatagtagg

SEQ ID NO: 45111 - DNA, 21 bp, synthetic construct
  misc_feature 1..21: note = Description of Artificial Sequence: Synthetic oligonucleotide
  source 1..21: mol_type = other DNA
cgtcagacggataagttgagt

SEQ ID NO: 45112 - DNA, 21 bp, synthetic construct
  misc_feature 1..21: note = Description of Artificial Sequence: Synthetic oligonucleotide
  source 1..21: mol_type = other DNA
gcccccctccaaagcaacctc

SEQ ID NO: 45113 - DNA, 21 bp, synthetic construct
  misc_feature 1..21: note = Description of Artificial Sequence: Synthetic oligonucleotide
  source 1..21: mol_type = other DNA
gctaggggtaagccggctctg

SEQ ID NO: 45114 - DNA, 21 bp, synthetic construct
  misc_feature 1..21: note = Description of Artificial Sequence: Synthetic oligonucleotide
  source 1..21: mol_type = other DNA
cccggcagaccccaaaccgac

SEQ ID NO: 45115 - DNA, 21 bp, synthetic construct
  misc_feature 1..21: note = Description of Artificial Sequence: Synthetic oligonucleotide
  source 1..21: mol_type = other DNA
accagacaaggcatgggcagc

SEQ ID NO: 45116 - DNA, 21 bp, synthetic construct
  misc_feature 1..21: note = Description of Artificial Sequence: Synthetic oligonucleotide
  source 1..21: mol_type = other DNA
ggtgctgagcggacggttctt

SEQ ID NO: 45117 - DNA, 21 bp, synthetic construct
  misc_feature 1..21: note = Description of Artificial Sequence: Synthetic oligonucleotide
  source 1..21: mol_type = other DNA
atgggccaagtcggcgtcaga

SEQ ID NO: 45118 - DNA, 21 bp, synthetic construct
  misc_feature 1..21: note = Description of Artificial Sequence: Synthetic oligonucleotide
  source 1..21: mol_type = other DNA
aacaacggcagacccatcgcc

SEQ ID NO: 45119 - DNA, 21 bp, synthetic construct
  misc_feature 1..21: note = Description of Artificial Sequence: Synthetic oligonucleotide
  source 1..21: mol_type = other DNA
tacagaaacgtcaacagcagc

SEQ ID NO: 45120 - DNA, 21 bp, synthetic construct
  misc_feature 1..21: note = Description of Artificial Sequence: Synthetic oligonucleotide
  source 1..21: mol_type = other DNA
aacggcagcggccaacaccaa

SEQ ID NO: 45121 - DNA, 21 bp, synthetic construct
  misc_feature 1..21: note = Description of Artificial Sequence: Synthetic oligonucleotide
  source 1..21: mol_type = other DNA
agcatccccatcagccacgtc

SEQ ID NO: 45122 - DNA, 21 bp, synthetic construct
  misc_feature 1..21: note = Description of Artificial Sequence: Synthetic oligonucleotide
  source 1..21: mol_type = other DNA
agcaacggccaaggccccgcc

SEQ ID NO: 45123 - DNA, 21 bp, synthetic construct
  misc_feature 1..21: note = Description of Artificial Sequence: Synthetic oligonucleotide
  source 1..21: mol_type = other DNA
ggcatgcacagcgtcgccaaa

SEQ ID NO: 45124 - DNA, 21 bp, synthetic construct
  misc_feature 1..21: note = Description of Artificial Sequence: Synthetic oligonucleotide
  source 1..21: mol_type = other DNA
ggggcttcgactcctaggctt

SEQ ID NO: 45125 - DNA, 21 bp, synthetic construct
  misc_feature 1..21: note = Description of Artificial Sequence: Synthetic oligonucleotide
  source 1..21: mol_type = other DNA
ggcctcaaaggcagcttcccc

SEQ ID NO: 45126 - DNA, 21 bp, synthetic construct
  misc_feature 1..21: note = Description of Artificial Sequence: Synthetic oligonucleotide
  source 1..21: mol_type = other DNA
agtaatccgagtgggttttcg

SEQ ID NO: 45127 - DNA, 21 bp, synthetic construct
  misc_feature 1..21: note = Description of Artificial Sequence: Synthetic oligonucleotide
  source 1..21: mol_type = other DNA
tctacggtgggtcatatgact

SEQ ID NO: 45128 - DNA, 21 bp, synthetic construct
  misc_feature 1..21: note = Description of Artificial Sequence: Synthetic oligonucleotide
  source 1..21: mol_type = other DNA
gggccgtcttctcctcggctt

SEQ ID NO: 45129 - DNA, 21 bp, synthetic construct
  misc_feature 1..21: note = Description of Artificial Sequence: Synthetic oligonucleotide
  source 1..21: mol_type = other DNA
ggccaagccgtcaacaccgcc

SEQ ID NO: 45130 - DNA, 21 bp, synthetic construct
  misc_feature 1..21: note = Description of Artificial Sequence: Synthetic oligonucleotide
  source 1..21: mol_type = other DNA
ggcgccagcgtcaaccaaggc

SEQ ID NO: 45131 - DNA, 21 bp, synthetic construct
  misc_feature 1..21: note = Description of Artificial Sequence: Synthetic oligonucleotide
  source 1..21: mol_type = other DNA
actactatgagtaagccttcg

SEQ ID NO: 45132 - DNA, 21 bp, synthetic construct
  misc_feature 1..21: note = Description of Artificial Sequence: Synthetic oligonucleotide
  source 1..21: mol_type = other DNA
acgtcttctgcgcgtgttacg

SEQ ID NO: 45133 - DNA, 21 bp, synthetic construct
  misc_feature 1..21: note = Description of Artificial Sequence: Synthetic oligonucleotide
  source 1..21: mol_type = other DNA
ggggataagaatcatggtagt

SEQ ID NO: 45134 - DNA, 21 bp, synthetic construct
  misc_feature 1..21: note = Description of Artificial Sequence: Synthetic oligonucleotide
  source 1..21: mol_type = other DNA
cccaccctcggcaccaccaaa

SEQ ID NO: 45135 - DNA, 21 bp, synthetic construct
  misc_feature 1..21: note = Description of Artificial Sequence: Synthetic oligonucleotide
  source 1..21: mol_type = other DNA
cacatgacccacaccaccgcc

SEQ ID NO: 45136 - DNA, 21 bp, synthetic construct
  misc_feature 1..21: note = Description of Artificial Sequence: Synthetic oligonucleotide
  source 1..21: mol_type = other DNA
gttgcttcttcggctcatgtt

SEQ ID NO: 45137 - DNA, 21 bp, synthetic construct
  misc_feature 1..21: note = Description of Artificial Sequence: Synthetic oligonucleotide
  source 1..21: mol_type = other DNA
tcgtatcctagtcagttgaat

SEQ ID NO: 45138 - DNA, 21 bp, synthetic construct
  misc_feature 1..21: note = Description of Artificial Sequence: Synthetic oligonucleotide
  source 1..21: mol_type = other DNA
cccaccaaagccaacgtcacc

SEQ ID NO: 45139 - DNA, 21 bp, synthetic construct
  misc_feature 1..21: note = Description of Artificial Sequence: Synthetic oligonucleotide
  source 1..21: mol_type = other DNA
ggtcggagtccgacggcttct

SEQ ID NO: 45140 - DNA, 21 bp, synthetic construct
  misc_feature 1..21: note = Description of Artificial Sequence: Synthetic oligonucleotide
  source 1..21: mol_type = other DNA
gccaccggcagaaacaccgcc

SEQ ID NO: 45141 - DNA, 21 bp, synthetic construct
  misc_feature 1..21: note = Description of Artificial Sequence: Synthetic oligonucleotide
  source 1..21: mol_type = other DNA
agcagcggcagcaacagaagc

SEQ ID NO: 45142 - DNA, 21 bp, synthetic construct
  misc_feature 1..21: note = Description of Artificial Sequence: Synthetic oligonucleotide
  source 1..21: mol_type = other DNA
gctcctacttcgggtccgagt

SEQ ID NO: 45143 - DNA, 21 bp, synthetic construct
  misc_feature 1..21: note = Description of Artificial Sequence: Synthetic oligonucleotide
  source 1..21: mol_type = other DNA
agccccaccagcgccagcctc

SEQ ID NO: 45144 - DNA, 21 bp, synthetic construct
  misc_feature 1..21: note = Description of Artificial Sequence: Synthetic oligonucleotide
  source 1..21: mol_type = other DNA
gtccccagcagcagaagcaac

SEQ ID NO: 45145 - DNA, 21 bp, synthetic construct
  misc_feature 1..21: note = Description of Artificial Sequence: Synthetic oligonucleotide
  source 1..21: mol_type = other DNA
acgtctacgcagaagggtcag

SEQ ID NO: 45146 - DNA, 21 bp, synthetic construct
  misc_feature 1..21: note = Description of Artificial Sequence: Synthetic oligonucleotide
  source 1..21: mol_type = other DNA
aatcagattaatgctcctcgt

SEQ ID NO: 45147 - DNA, 21 bp, synthetic construct
  misc_feature 1..21: note = Description of Artificial Sequence: Synthetic oligonucleotide
  source 1..21: mol_type = other DNA
agtgcgactgggtcgaggctg

SEQ ID NO: 45148 - DNA, 21 bp, synthetic construct
  misc_feature 1..21: note = Description of Artificial Sequence: Synthetic oligonucleotide
  source 1..21: mol_type = other DNA
gtgtcttatgctcgtacggag

SEQ ID NO: 45149 - DNA, 21 bp, synthetic construct
  misc_feature 1..21: note = Description of Artificial Sequence: Synthetic oligonucleotide
  source 1..21: mol_type = other DNA
gggcttgatcatcttcggacg

SEQ ID NO: 45150 - DNA, 21 bp, synthetic construct
  misc_feature 1..21: note = Description of Artificial Sequence: Synthetic oligonucleotide
  source 1..21: mol_type = other DNA
ctgcctcatacttctcagtcg

SEQ ID NO: 45151 - DNA, 21 bp, synthetic construct
  misc_feature 1..21: note = Description of Artificial Sequence: Synthetic oligonucleotide
  source 1..21: mol_type = other DNA
agccccaacaaaaccagcctc

SEQ ID NO: 45152 - DNA, 21 bp, synthetic construct
  misc_feature 1..21: note = Description of Artificial Sequence: Synthetic oligonucleotide
  source 1..21: mol_type = other DNA
ggcctcgccaccctcagcggc

SEQ ID NO: 45153 - DNA, 21 bp, synthetic construct
  misc_feature 1..21: note = Description of Artificial Sequence: Synthetic oligonucleotide
  source 1..21: mol_type = other DNA
agctacggcaaagaaagcagc

SEQ ID NO: 45154 - DNA, 21 bp, synthetic construct
  misc_feature 1..21: note = Description of Artificial Sequence: Synthetic oligonucleotide
  source 1..21: mol_type = other DNA
cagggtcgtgcgaatgggtct

SEQ ID NO: 45155 - DNA, 21 bp, synthetic construct
  misc_feature 1..21: note = Description of Artificial Sequence: Synthetic oligonucleotide
  source 1..21: mol_type = other DNA
cccggcggcaccaccaaaggc

SEQ ID NO: 45156 - DNA, 21 bp, synthetic construct
  misc_feature 1..21: note = Description of Artificial Sequence: Synthetic oligonucleotide
  source 1..21: mol_type = other DNA
agccccatgagaagccaagtc

SEQ ID NO: 45157 - DNA, 21 bp, synthetic construct
  misc_feature 1..21: note = Description of Artificial Sequence: Synthetic oligonucleotide
  source 1..21: mol_type = other DNA
gctcttggtggtaagcatgtt

SEQ ID NO: 45158 - DNA, 21 bp, synthetic construct
  misc_feature 1..21: note = Description of Artificial Sequence: Synthetic oligonucleotide
  source 1..21: mol_type = other DNA
ttcgccaacaccgccaacaga

SEQ ID NO: 45159 - DNA, 21 bp, synthetic construct
  misc_feature 1..21: note = Description of Artificial Sequence: Synthetic oligonucleotide
  source 1..21: mol_type = other DNA
tttggggatcatactcgtacg

SEQ ID NO: 45160 - DNA, 21 bp, synthetic construct
  misc_feature 1..21: note = Description of Artificial Sequence: Synthetic oligonucleotide
  source 1..21: mol_type = other DNA
aatgtggttgggactggtgct

SEQ ID NO: 45161 - DNA, 21 bp, synthetic construct
  misc_feature 1..21: note = Description of Artificial Sequence: Synthetic oligonucleotide
  source 1..21: mol_type = other DNA
tctaggtcgcctggtacgtcg

SEQ ID NO: 45162 - DNA, 21 bp, synthetic construct
  misc_feature 1..21: note = Description of Artificial Sequence: Synthetic oligonucleotide
  source 1..21: mol_type = other DNA
cccgtcccctacagagccgac

SEQ ID NO: 45163 - DNA, 21 bp, synthetic construct
  misc_feature 1..21: note = Description of Artificial Sequence: Synthetic oligonucleotide
  source 1..21: mol_type = other DNA
ccgacgaagggggctaatgcg

SEQ ID NO: 45164 - DNA, 21 bp, synthetic construct
  misc_feature 1..21: note = Description of Artificial Sequence: Synthetic oligonucleotide
  source 1..21: mol_type = other DNA
actacgaatacggtgtctcgg

SEQ ID NO: 45165 - DNA, 21 bp, synthetic construct
  misc_feature 1..21: note = Description of Artificial Sequence: Synthetic oligonucleotide
  source 1..21: mol_type = other DNA
aacggcagcgccagaatgacc

SEQ ID NO: 45166 - DNA, 21 bp, synthetic construct
  misc_feature 1..21: note = Description of Artificial Sequence: Synthetic oligonucleotide
  source 1..21: mol_type = other DNA
caaaacagcaaaggctacgtc

SEQ ID NO: 45167 - DNA, 21 bp, synthetic construct
  misc_feature 1..21: note = Description of Artificial Sequence: Synthetic oligonucleotide
  source 1..21: mol_type = other DNA
agtgggggtactcctgggcgt

SEQ ID NO: 45168 - DNA, 21 bp, synthetic construct
  misc_feature 1..21: note = Description of Artificial Sequence: Synthetic oligonucleotide
  source 1..21: mol_type = other DNA
aattcgtctggtcattatcag

SEQ ID NO: 45169 - DNA, 21 bp, synthetic construct
  misc_feature 1..21: note = Description of Artificial Sequence: Synthetic oligonucleotide
  source 1..21: mol_type = other DNA
aacgtccccagcatcagcaga

SEQ ID NO: 45170 - DNA, 21 bp, synthetic construct
  misc_feature 1..21: note = Description of Artificial Sequence: Synthetic oligonucleotide
  source 1..21: mol_type = other DNA
gggcttgctggtagtttgcag

SEQ ID NO: 45171 - DNA, 21 bp, synthetic construct
  misc_feature 1..21: note = Description of Artificial Sequence: Synthetic oligonucleotide
  source 1..21: mol_type = other DNA
catcagagtagttcgagttcg

SEQ ID NO: 45172 - DNA, 21 bp, synthetic construct
  misc_feature 1..21: note = Description of Artificial Sequence: Synthetic oligonucleotide
  source 1..21: mol_type = other DNA
gatcgtgcggggaagcagagt

SEQ ID NO: 45173 - DNA, 21 bp, synthetic construct
  misc_feature 1..21: note = Description of Artificial Sequence: Synthetic oligonucleotide
  source 1..21: mol_type = other DNA
aatgcgcttcctgtgactcag

SEQ ID NO: 45174 - DNA, 21 bp, synthetic construct
  misc_feature 1..21: note = Description of Artificial Sequence: Synthetic oligonucleotide
  source 1..21: mol_type = other DNA
gaagtccacgccaaaaacaac

SEQ ID NO: 45175 - DNA, 21 bp, synthetic construct
  misc_feature 1..21: note = Description of Artificial Sequence: Synthetic oligonucleotide
  source 1..21: mol_type = other DNA
ggcaccagcggcggcatcgtc

SEQ ID NO: 45176 - DNA, 21 bp, synthetic construct
  misc_feature 1..21: note = Description of Artificial Sequence: Synthetic oligonucleotide
  source 1..21: mol_type = other DNA
tggggcggcagcgccgacaga

SEQ ID NO: 45177 - DNA, 21 bp, synthetic construct
  misc_feature 1..21: note = Description of Artificial Sequence: Synthetic oligonucleotide
  source 1..21: mol_type = other DNA
aatcagtctgctaagtcgacg

SEQ ID NO: 45178 - DNA, 21 bp, synthetic construct
  misc_feature 1..21: note = Description of Artificial Sequence: Synthetic oligonucleotide
  source 1..21: mol_type = other DNA
gcttcttctagtcgtcctagt

SEQ ID NO: 45179 - DNA, 21 bp, synthetic construct
  misc_feature 1..21: note = Description of Artificial Sequence: Synthetic oligonucleotide
  source 1..21: mol_type = other DNA
gatcgtcttgatcattctagg

SEQ ID NO: 45180 - DNA, 21 bp, synthetic construct
  misc_feature 1..21: note = Description of Artificial Sequence: Synthetic oligonucleotide
  source 1..21: mol_type = other DNA
tctattccgacgtctgctagg

SEQ ID NO: 45181 - DNA, 21 bp, synthetic construct
  misc_feature 1..21: note = Description of Artificial Sequence: Synthetic oligonucleotide
  source 1..21: mol_type = other DNA
actaggaatggtcagggtgat

SEQ ID NO: 45182 - DNA, 21 bp, synthetic construct
  misc_feature 1..21: note = Description of Artificial Sequence: Synthetic oligonucleotide
  source 1..21: mol_type = other DNA
ccctacagcagacccgcccaa

SEQ ID NO: 45183 - DNA, 21 bp, synthetic construct
  misc_feature 1..21: note = Description of Artificial Sequence: Synthetic oligonucleotide
  source 1..21: mol_type = other DNA
gttggttctgggcgtgctaat

SEQ ID NO: 45184 - DNA, 21 bp, synthetic construct
  misc_feature 1..21: note = Description of Artificial Sequence: Synthetic oligonucleotide
  source 1..21: mol_type = other DNA
aatcgggttggttcgatttct

SEQ ID NO: 45185 - DNA, 21 bp, synthetic construct
  misc_feature 1..21: note = Description of Artificial Sequence: Synthetic oligonucleotide
  source 1..21: mol_type = other DNA
ggtacgaatcctgggacgttg

SEQ ID NO: 45186 - DNA, 21 bp, synthetic construct
  misc_feature 1..21: note = Description of Artificial Sequence: Synthetic oligonucleotide
  source 1..21: mol_type = other DNA
aacggcaaccacggcctcatc

SEQ ID NO: 45187 - DNA, 21 bp, synthetic construct
  misc_feature 1..21: note = Description of Artificial Sequence: Synthetic oligonucleotide
  source 1..21: mol_type = other DNA
cccggcatcaacaccaacagc

SEQ ID NO: 45188 - DNA, 21 bp, synthetic construct
  misc_feature 1..21: note = Description of Artificial Sequence: Synthetic oligonucleotide
  source 1..21: mol_type = other DNA
agacccagcagcgtcaaagac

SEQ ID NO: 45189 - DNA, 21 bp, synthetic construct
  misc_feature 1..21: note = Description of Artificial Sequence: Synthetic oligonucleotide
  source 1..21: mol_type = other DNA
tgtttgggttcgaataatttg

SEQ ID NO: 45190 - DNA, 21 bp, synthetic construct
  misc_feature 1..21: note = Description of Artificial Sequence: Synthetic oligonucleotide
  source 1..21: mol_type = other DNA
gaccccgacaccagaaaaagc

SEQ ID NO: 45191 - DNA, 21 bp, synthetic construct
  misc_feature 1..21: note = Description of Artificial Sequence: Synthetic oligonucleotide
  source 1..21: mol_type = other DNA
cagttgcagcctagggttgcg

SEQ ID NO: 45192 - DNA, 21 bp, synthetic construct
  misc_feature 1..21: note = Description of Artificial Sequence: Synthetic oligonucleotide
  source 1..21: mol_type = other DNA
cgtcctgcttcgacgcatacg

SEQ ID NO: 45193 - DNA, 21 bp, synthetic construct
  misc_feature 1..21: note = Description of Artificial Sequence: Synthetic oligonucleotide
  source 1..21: mol_type = other DNA
gcttcgtcgtctaagtctgtt

SEQ ID NO: 45194 - DNA, 21 bp, synthetic construct
  misc_feature 1..21: note = Description of Artificial Sequence: Synthetic oligonucleotide
  source 1..21: mol_type = other DNA
cacaccagacccaacagcatg

SEQ ID NO: 45195 - DNA, 21 bp, synthetic construct
  misc_feature 1..21: note = Description of Artificial Sequence: Synthetic oligonucleotide
  source 1..21: mol_type = other DNA
aacggcgtcccccaacccaaa

SEQ ID NO: 45196 - DNA, 21 bp, synthetic construct
  misc_feature 1..21: note = Description of Artificial Sequence: Synthetic oligonucleotide
  source 1..21: mol_type = other DNA
tctcatgctagtagtactgcg

SEQ ID NO: 45197 - DNA, 21 bp, synthetic construct
  misc_feature 1..21: note = Description of Artificial Sequence: Synthetic oligonucleotide
  source 1..21: mol_type = other DNA
accggcgaaagacaaagcagc

SEQ ID NO: 45198 - DNA, 21 bp, synthetic construct
  misc_feature 1..21: note = Description of Artificial Sequence: Synthetic oligonucleotide
  source 1..21: mol_type = other DNA
ccgactcatgcttcgagtctt

SEQ ID NO: 45199 - DNA, 21 bp, synthetic construct
  misc_feature 1..21: note = Description of Artificial Sequence: Synthetic oligonucleotide
  source 1..21: mol_type = other DNA
gttgcgtcttctccgcttcgt

SEQ ID NO: 45200 - DNA, 21 bp, synthetic construct
  misc_feature 1..21: note = Description of Artificial Sequence: Synthetic oligonucleotide
  source 1..21: mol_type = other DNA
cgtcctggggggaaggatggg

SEQ ID NO: 45201 - DNA, 21 bp, synthetic construct
  misc_feature 1..21: note = Description of Artificial Sequence: Synthetic oligonucleotide
  source 1..21: mol_type = other DNA
agggatacgaatcggtttggt

SEQ ID NO: 45202 - DNA, 21 bp, synthetic construct
  misc_feature 1..21: note = Description of Artificial Sequence: Synthetic oligonucleotide
  source 1..21: mol_type = other DNA
gcgccttcttcgcagcttttg

SEQ ID NO: 45203 - DNA, 21 bp, synthetic construct
  misc_feature 1..21: note = Description of Artificial Sequence: Synthetic oligonucleotide
  source 1..21: mol_type = other DNA
gttaatacgaatctggttggt

SEQ ID NO: 45204 - DNA, 21 bp, synthetic construct
  misc_feature 1..21: note = Description of Artificial Sequence: Synthetic oligonucleotide
  source 1..21: mol_type = other DNA
agcagccccagccacatggcc

SEQ ID NO: 45205 - DNA, 21 bp, synthetic construct
  misc_feature 1..21: note = Description of Artificial Sequence: Synthetic oligonucleotide
  source 1..21: mol_type = other DNA
agccacgccaccgccgccacc

SEQ ID NO: 45206 - DNA, 21 bp, synthetic construct
  misc_feature 1..21: note = Description of Artificial Sequence: Synthetic oligonucleotide
  source 1..21: mol_type = other DNA
gatgctggttctcgttcttct

SEQ ID NO: 45207 - DNA, 21 bp, synthetic construct
  misc_feature 1..21: note = Description of Artificial Sequence: Synthetic oligonucleotide
  source 1..21: mol_type = other DNA
cacggcaccacccccgccaga

SEQ ID NO: 45208 - DNA, 21 bp, synthetic construct
  misc_feature 1..21: note = Description of Artificial Sequence: Synthetic oligonucleotide
  source 1..21: mol_type = other DNA
gaacccctcagcaaacaaagc

SEQ ID NO: 45209 - DNA, 21 bp, synthetic construct
  misc_feature 1..21: note = Description of Artificial Sequence: Synthetic oligonucleotide
  source 1..21: mol_type = other DNA
cgtcatcaggggacgctgcag

SEQ ID NO: 45210 - DNA, 21 bp, synthetic construct
  misc_feature 1..21: note = Description of Artificial Sequence: Synthetic oligonucleotide
  source 1..21: mol_type = other DNA
cccctcaccaccagacccagc

SEQ ID NO: 45211 - DNA, 21 bp, synthetic construct
  misc_feature 1..21: note = Description of Artificial Sequence: Synthetic oligonucleotide
  source 1..21: mol_type = other DNA
agcagcagcacccacgccgtc

SEQ ID NO: 45212 - DNA, 21 bp, synthetic construct
  misc_feature 1..21: note = Description of Artificial Sequence: Synthetic oligonucleotide
  source 1..21: mol_type = other DNA
cagacgcatgcgcctacgtcg

SEQ ID NO: 45213 - DNA, 21 bp, synthetic construct
  misc_feature 1..21: note = Description of Artificial Sequence: Synthetic oligonucleotide
  source 1..21: mol_type = other DNA
aacggtactggacagaatcaa

SEQ ID NO: 45214 - DNA, 21 bp, synthetic construct
  misc_feature 1..21: note = Description of Artificial Sequence: Synthetic oligonucleotide
  source 1..21: mol_type = other DNA
tcgtatggtcatcctggtgct

SEQ ID NO: 45215 - DNA, 21 bp, synthetic construct
  misc_feature 1..21: note = Description of Artificial Sequence: Synthetic oligonucleotide
  source 1..21: mol_type = other DNA
cagtcggggtcgaagcctggg

SEQ ID NO: 45216 - DNA, 21 bp, synthetic construct
  misc_feature 1..21: note = Description of Artificial Sequence: Synthetic oligonucleotide
  source 1..21: mol_type = other DNA
tcgtttgctaagtctgcgtcg

SEQ ID NO: 45217 - DNA, 21 bp, synthetic construct
  misc_feature 1..21: note = Description of Artificial Sequence: Synthetic oligonucleotide
  source 1..21: mol_type = other DNA
aggccggtggggggtctggcg

SEQ ID NO: 45218 - DNA, 21 bp, synthetic construct
  misc_feature 1..21: note = Description of Artificial Sequence: Synthetic oligonucleotide
  source 1..21: mol_type = other DNA
ctcgtcagccacacccacggc

SEQ ID NO: 45219 - DNA, 21 bp, synthetic construct
  misc_feature 1..21: note = Description of Artificial Sequence: Synthetic oligonucleotide
  source 1..21: mol_type = other DNA
ttgacgccttctagtacggtt

SEQ ID NO: 45220 - DNA, 21 bp, synthetic construct
  misc_feature 1..21: note = Description of Artificial Sequence: Synthetic oligonucleotide
  source 1..21: mol_type = other DNA
agcatccacagcaccaaagcc

SEQ ID NO: 45221 - DNA, 21 bp, synthetic construct
  misc_feature 1..21: note = Description of Artificial Sequence: Synthetic oligonucleotide
  source 1..21: mol_type = other DNA
ggcgtcatcaacaacgaaaga

SEQ ID NO: 45222 - DNA, 21 bp, synthetic construct
  misc_feature 1..21: note = Description of Artificial Sequence: Synthetic oligonucleotide
  source 1..21: mol_type = other DNA
gatcctctgaggaatagtaat

SEQ ID NO: 45223 - DNA, 21 bp, synthetic construct
  misc_feature 1..21: note = Description of Artificial Sequence: Synthetic oligonucleotide
  source 1..21: mol_type = other DNA
aatgctaatcagaatcagatg

SEQ ID NO: 45224 - DNA, 21 bp, synthetic construct
  misc_feature 1..21: note = Description of Artificial Sequence: Synthetic oligonucleotide
  source 1..21: mol_type = other DNA
agccaagtcagccacagcgtc

SEQ ID NO: 45225 - DNA, 21 bp, synthetic construct
  misc_feature 1..21: note = Description of Artificial Sequence: Synthetic oligonucleotide
  source 1..21: mol_type = other DNA
gggcatagtactgtgggtagt

SEQ ID NO: 45226 - DNA, 21 bp, synthetic construct
  misc_feature 1..21: note = Description of Artificial Sequence: Synthetic oligonucleotide
  source 1..21: mol_type = other DNA
agattcagcgacagcaacacc

SEQ ID NO: 45227 - DNA, 21 bp, synthetic construct
  misc_feature 1..21: note = Description of Artificial Sequence: Synthetic oligonucleotide
  source 1..21: mol_type = other DNA
acggggacggctactcttcgt

SEQ ID NO: 45228 - DNA, 21 bp, synthetic construct
  misc_feature 1..21: note = Description of Artificial Sequence: Synthetic oligonucleotide
  source 1..21: mol_type = other DNA
ggccaaggcgtcagagccatg

SEQ ID NO: 45229 - DNA, 21 bp, synthetic construct
  misc_feature 1..21: note = Description of Artificial Sequence: Synthetic oligonucleotide
  source 1..21: mol_type = other DNA
gccggcagccacaaaggcgtc

SEQ ID NO: 45230 - DNA, 21 bp, synthetic construct
  misc_feature 1..21: note = Description of Artificial Sequence: Synthetic oligonucleotide
  source 1..21: mol_type = other DNA
tctgggaatagtcataatggg

SEQ ID NO: 45231 - DNA, 21 bp, synthetic construct
  misc_feature 1..21: note = Description of Artificial Sequence: Synthetic oligonucleotide
  source 1..21: mol_type = other DNA
tcgggtgcgactacgcctagg

SEQ ID NO: 45232 - DNA, 21 bp, synthetic construct
  misc_feature 1..21: note = Description of Artificial Sequence: Synthetic oligonucleotide
  source 1..21: mol_type = other DNA
actggtatgcgtcctcctggg

SEQ ID NO: 45233 - DNA, 21 bp, synthetic construct
  misc_feature 1..21: note = Description of Artificial Sequence: Synthetic oligonucleotide
  source 1..21: mol_type = other DNA
aaacaaacccacagcggcagc

SEQ ID NO: 45234 - DNA, 21 bp, synthetic construct
  misc_feature 1..21: note = Description of Artificial Sequence: Synthetic oligonucleotide
  source 1..21: mol_type = other DNA
caaggccaaaccgccatgaga

SEQ ID NO: 45235 - DNA, 21 bp, synthetic construct
  misc_feature 1..21: note = Description of Artificial Sequence: Synthetic oligonucleotide
  source 1..21: mol_type = other DNA
ggccaagtcaaccacaccacc

SEQ ID NO: 45236 - DNA, 21 bp, synthetic construct
  misc_feature 1..21: note = Description of Artificial Sequence: Synthetic oligonucleotide
  source 1..21: mol_type = other DNA
ggcaacagcaccagactcctc

SEQ ID NO: 45237 - DNA, 21 bp, synthetic construct
  misc_feature 1..21: note = Description of Artificial Sequence: Synthetic oligonucleotide
  source 1..21: mol_type = other DNA
catgtgcatgatgggaggact

SEQ ID NO: 45238 - DNA, 21 bp, synthetic construct
  misc_feature 1..21: note = Description of Artificial Sequence: Synthetic oligonucleotide
  source 1..21: mol_type = other DNA
ccgttgggtaatcgtccttct

SEQ ID NO: 45239 - DNA, 21 bp, synthetic construct
  misc_feature 1..21: note = Description of Artificial Sequence: Synthetic oligonucleotide
  source 1..21: mol_type = other DNA
gagcctgttacttctaagtct

SEQ ID NO: 45240 - DNA, 21 bp, synthetic construct
  misc_feature 1..21: note = Description of Artificial Sequence: Synthetic oligonucleotide
  source 1..21: mol_type = other DNA
cataagactacgtctatggct

SEQ ID NO: 45241 - DNA, 21 bp, synthetic construct
  misc_feature 1..21: note = Description of Artificial Sequence: Synthetic oligonucleotide
  source 1..21: mol_type = other DNA
accaccgccggcagcagatgc

SEQ ID NO: 45242 - DNA, 21 bp, synthetic construct
  misc_feature 1..21: note = Description of Artificial Sequence: Synthetic oligonucleotide
  source 1..21: mol_type = other DNA
gatattccttctagggctgcg

SEQ ID NO: 45243 - DNA, 21 bp, synthetic construct
  misc_feature 1..21: note = Description of Artificial Sequence: Synthetic oligonucleotide
  source 1..21: mol_type = other DNA
agggaggatactaagatgcat

SEQ ID NO: 45244 - DNA, 21 bp, synthetic construct
  misc_feature 1..21: note = Description of Artificial Sequence: Synthetic oligonucleotide
  source 1..21: mol_type = other DNA
aggctgaatgatcgtcctggg

SEQ ID NO: 45245 - DNA, 21 bp, synthetic construct
  misc_feature 1..21: note = Description of Artificial Sequence: Synthetic oligonucleotide
  source 1..21: mol_type = other DNA
cgtacgggtcattatcaggat

SEQ ID NO: 45246 - DNA, 21 bp, synthetic construct
  misc_feature 1..21: note = Description of Artificial Sequence: Synthetic oligonucleotide
  source 1..21: mol_type = other DNA
aactgttctggacagaatcaa

SEQ ID NO: 45247 - DNA, 21 bp, synthetic construct
  misc_feature 1..21: note = Description of Artificial Sequence: Synthetic oligonucleotide
  source 1..21: mol_type = other DNA
aacgtttctggacagaatcaa

SEQ ID NO: 45248 - DNA, 21 bp, synthetic construct
  misc_feature 1..21: note = Description of Artificial Sequence: Synthetic oligonucleotide
  source 1..21: mol_type = other DNA
agcagaaccaacgccaccgcc

SEQ ID NO: 45249 - DNA, 21 bp, synthetic construct
  misc_feature 1..21: note = Description of Artificial Sequence: Synthetic oligonucleotide
  source 1..21: mol_type = other DNA
agcagcaccaacagacccacc

SEQ ID NO: 45250 - DNA, 21 bp, synthetic construct
  misc_feature 1..21: note = Description of Artificial Sequence: Synthetic oligonucleotide
  source 1..21: mol_type = other DNA
gtcggcctccaaagccccgaa

SEQ ID NO: 45251 - DNA, 21 bp, synthetic construct
  misc_feature 1..21: note = Description of Artificial Sequence: Synthetic oligonucleotide
  source 1..21: mol_type = other DNA
gggattgggtcggctgcggtt

SEQ ID NO: 45252 - DNA, 21 bp, synthetic construct
  misc_feature 1..21: note = Description of Artificial Sequence: Synthetic oligonucleotide
  source 1..21: mol_type = other DNA
tcgagtccgtctaagatggcg

SEQ ID NO: 45253 - DNA, 21 bp, synthetic construct
  misc_feature 1..21: note = Description of Artificial Sequence: Synthetic oligonucleotide
  source 1..21: mol_type = other DNA
cgggctgagacgaatgctatt

SEQ ID NO: 45254 - DNA, 21 bp, synthetic construct
  misc_feature 1..21: note = Description of Artificial Sequence: Synthetic oligonucleotide
  source 1..21: mol_type = other DNA
tgccccggcagcagcgcctac

SEQ ID NO: 45255 - DNA, 21 bp, synthetic construct
  misc_feature 1..21: note = Description of Artificial Sequence: Synthetic oligonucleotide
  source 1..21: mol_type = other DNA
gagaatattagtaggtctcat

SEQ ID NO: 45256 - DNA, 21 bp, synthetic construct
  misc_feature 1..21: note = Description of Artificial Sequence: Synthetic oligonucleotide
  source 1..21: mol_type = other DNA
agcagcagcagccaccccctc

SEQ ID NO: 45257 - DNA, 21 bp, synthetic construct
  misc_feature 1..21: note = Description of Artificial Sequence: Synthetic oligonucleotide
  source 1..21: mol_type = other DNA
gagccgacgcatccgcggggt

SEQ ID NO: 45258 - DNA, 21 bp, synthetic construct
  misc_feature 1..21: note = Description of Artificial Sequence: Synthetic oligonucleotide
  source 1..21: mol_type = other DNA
catgcgcatagtaatgttggt

SEQ ID NO: 45259 - DNA, 21 bp, synthetic construct
  misc_feature 1..21: note = Description of Artificial Sequence: Synthetic oligonucleotide
  source 1..21: mol_type = other DNA
ggcaaccccagccccctcgtc

SEQ ID NO: 45260 - DNA, 21 bp, synthetic construct
  misc_feature 1..21: note = Description of Artificial Sequence: Synthetic oligonucleotide
  source 1..21: mol_type = other DNA
caaagcaacaccagccccacc

SEQ ID NO: 45261 - DNA, 21 bp, synthetic construct
  misc_feature 1..21: note = Description of Artificial Sequence: Synthetic oligonucleotide
  source 1..21: mol_type = other DNA
ggcatccaaaaccccacctgc

SEQ ID NO: 45262 - DNA, 21 bp, synthetic construct
  misc_feature 1..21: note = Description of Artificial Sequence: Synthetic oligonucleotide
  source 1..21: mol_type = other DNA
caaagcgaccacagaagcctc

SEQ ID NO: 45263 - DNA, 21 bp, synthetic construct
  misc_feature 1..21: note = Description of Artificial Sequence: Synthetic oligonucleotide
  source 1..21: mol_type = other DNA
caagaaaccagaggcaacagc

SEQ ID NO: 45264 - DNA, 21 bp, synthetic construct
  misc_feature 1..21: note = Description of Artificial Sequence: Synthetic oligonucleotide
  source 1..21: mol_type = other DNA
tctatggctcctgctggtctg

SEQ ID NO: 45265 - DNA, 21 bp, synthetic construct
  misc_feature 1..21: note = Description of Artificial Sequence: Synthetic oligonucleotide
  source 1..21: mol_type = other DNA
accggcaccggcagcttccac

SEQ ID NO: 45266 - DNA, 21 bp, synthetic construct
  misc_feature 1..21: note = Description of Artificial Sequence: Synthetic oligonucleotide
  source 1..21: mol_type = other DNA
aagtcttgtaagggtatggtt

SEQ ID NO: 45267 - DNA, 21 bp, synthetic construct
  misc_feature 1..21: note = Description of Artificial Sequence: Synthetic oligonucleotide
  source 1..21: mol_type = other DNA
gggggtgataataagcttacg

SEQ ID NO: 45268 - DNA, 21 bp, synthetic construct
  misc_feature 1..21: note = Description of Artificial Sequence: Synthetic oligonucleotide
  source 1..21: mol_type = other DNA
gatcgggctgatgcgaattct

SEQ ID NO: 45269 - DNA, 21 bp, synthetic construct
  misc_feature 1..21: note = Description of Artificial Sequence: Synthetic oligonucleotide
  source 1..21: mol_type = other DNA
gcccccagcgccagacccagc

SEQ ID NO: 45270 - DNA, 21 bp, synthetic construct
  misc_feature 1..21: note = Description of Artificial Sequence: Synthetic oligonucleotide
  source 1..21: mol_type = other DNA
ggttatgggtctaaggttagt

SEQ ID NO: 45271 - DNA, 21 bp, synthetic construct
  misc_feature 1..21: note = Description of Artificial Sequence: Synthetic oligonucleotide
  source 1..21: mol_type = other DNA
agttctgctaagagttcgctt

SEQ ID NO: 45272 - DNA, 21 bp, synthetic construct
  misc_feature 1..21: note = Description of Artificial Sequence: Synthetic oligonucleotide
  source 1..21: mol_type = other DNA
tttgtttcggctcgtagtggt

SEQ ID NO: 45273 - DNA, 21 bp, synthetic construct
  misc_feature 1..21: note = Description of Artificial Sequence: Synthetic oligonucleotide
  source 1..21: mol_type = other DNA
cccaacggcagccccctcagc

SEQ ID NO: 45274 - DNA, 21 bp, synthetic construct
  misc_feature 1..21: note = Description of Artificial Sequence: Synthetic oligonucleotide
  source 1..21: mol_type = other DNA
aagaatagtagtggtagtacg

SEQ ID NO: 45275 - DNA, 21 bp, synthetic construct
  misc_feature 1..21: note = Description of Artificial Sequence: Synthetic oligonucleotide
  source 1..21: mol_type = other DNA
aatatgcgtgctagtacggag

SEQ ID NO: 45276 - DNA, 21 bp, synthetic construct
  misc_feature 1..21: note = Description of Artificial Sequence: Synthetic oligonucleotide
  source 1..21: mol_type = other DNA
gacggttctggacagaatcaa

SEQ ID NO: 45277 - DNA, 21 bp, synthetic construct
  misc_feature 1..21: note = Description of Artificial Sequence: Synthetic oligonucleotide
  source 1..21: mol_type = other DNA
tgcatcaccaaaaacctcgcc

SEQ ID NO: 45278 - DNA, 21 bp, synthetic construct
  misc_feature 1..21: note = Description of Artificial Sequence: Synthetic oligonucleotide
  source 1..21: mol_type = other DNA
ggggctctgaatagtcgtggg

SEQ ID NO: 45279 - DNA, 21 bp, synthetic construct
  misc_feature 1..21: note = Description of Artificial Sequence: Synthetic oligonucleotide
  source 1..21: mol_type = other DNA
taccaagtccccctcgccaaa

SEQ ID NO: 45280 - DNA, 21 bp, synthetic construct
  misc_feature 1..21: note = Description of Artificial Sequence: Synthetic oligonucleotide
  source 1..21: mol_type = other DNA
acgccgacgctgtctcatact

SEQ ID NO: 45281 - DNA, 21 bp, synthetic construct
  misc_feature 1..21: note = Description of Artificial Sequence: Synthetic oligonucleotide
  source 1..21: mol_type = other DNA
aacggttgtggacagaatcaa

SEQ ID NO: 45282 - DNA, 21 bp, synthetic construct
  misc_feature 1..21: note = Description of Artificial Sequence: Synthetic oligonucleotide
  source 1..21: mol_type = other DNA
catattacgtcgaatcatgcg

SEQ ID NO: 45283 - DNA, 21 bp, synthetic construct
  misc_feature 1..21: note = Description of Artificial Sequence: Synthetic oligonucleotide
  source 1..21: mol_type = other DNA
aggggtaaggaggagagggat

SEQ ID NO: 45284 - DNA, 21 bp, synthetic construct
  misc_feature 1..21: note = Description of Artificial Sequence: Synthetic oligonucleotide
  source 1..21: mol_type = other DNA
aacggttctggagagaatcaa

SEQ ID NO: 45285 - DNA, 21 bp, synthetic construct
  misc_feature 1..21: note = Description of Artificial Sequence: Synthetic oligonucleotide
  source 1..21: mol_type = other DNA
ccggcggctatgtctagtgtt

SEQ ID NO: 45286 - DNA, 21 bp, synthetic construct
  misc_feature 1..21: note = Description of Artificial Sequence: Synthetic oligonucleotide
  source 1..21: mol_type = other DNA
agtgttggtacgtcggggctt

SEQ ID NO: 45287 - DNA, 21 bp, synthetic construct
  misc_feature 1..21: note = Description of Artificial Sequence: Synthetic oligonucleotide
  source 1..21: mol_type = other DNA
acgcagcggtcgcagactgcg

SEQ ID NO: 45288 - DNA, 21 bp, synthetic construct
  misc_feature 1..21: note = Description of Artificial Sequence: Synthetic oligonucleotide
  source 1..21: mol_type = other DNA
aatctgggtcagaatctgtct

SEQ ID NO: 45289 - DNA, 21 bp, synthetic construct
  misc_feature 1..21: note = Description of Artificial Sequence: Synthetic oligonucleotide
  source 1..21: mol_type = other DNA
tgccccagcaccaaaagctgc

SEQ ID NO: 45290 - DNA, 21 bp, synthetic construct
  misc_feature 1..21: note = Description of Artificial Sequence: Synthetic oligonucleotide
  source 1..21: mol_type = other DNA
tctccgacgagtcctatgaat

SEQ ID NO: 45291 - DNA, 21 bp, synthetic construct
  misc_feature 1..21: note = Description of Artificial Sequence: Synthetic oligonucleotide
  source 1..21: mol_type = other DNA
aataagacgatgtcttctacg

SEQ ID NO: 45292 - DNA, 21 bp, synthetic construct
  misc_feature 1..21: note = Description of Artificial Sequence: Synthetic oligonucleotide
  source 1..21: mol_type = other DNA
tcgtattctagtaaggagacg

SEQ ID NO: 45293 - DNA, 21 bp, synthetic construct
  misc_feature 1..21: note = Description of Artificial Sequence: Synthetic oligonucleotide
  source 1..21: mol_type = other DNA
cctgtgcagcattcgagtaat

SEQ ID NO: 45294 - DNA, 21 bp, synthetic construct
  misc_feature 1..21: note = Description of Artificial Sequence: Synthetic oligonucleotide
  source 1..21: mol_type = other DNA
ctcggcatcgccaaaatcggc

SEQ ID NO: 45295 - DNA, 21 bp, synthetic construct
  misc_feature 1..21: note = Description of Artificial Sequence: Synthetic oligonucleotide
  source 1..21: mol_type = other DNA
aataggtcgaaggagtctgcg

SEQ ID NO: 45296 - DNA, 21 bp, synthetic construct
  misc_feature 1..21: note = Description of Artificial Sequence: Synthetic oligonucleotide
  source 1..21: mol_type = other DNA
ccgcctcatgatgggcagcgt

SEQ ID NO: 45297 - DNA, 21 bp, synthetic construct
  misc_feature 1..21: note = Description of Artificial Sequence: Synthetic oligonucleotide
  source 1..21: mol_type = other DNA
cacggcgtcaacaaaaccgaa

SEQ ID NO: 45298 - DNA, 21 bp, synthetic construct
  misc_feature 1..21: note = Description of Artificial Sequence: Synthetic oligonucleotide
  source 1..21: mol_type = other DNA
gaccaagtcagccacaaactc

SEQ ID NO: 45299 - DNA, 21 bp, synthetic construct
  misc_feature 1..21: note = Description of Artificial Sequence: Synthetic oligonucleotide
  source 1..21: mol_type = other DNA
aatagtgcgaataagactccg

SEQ ID NO: 45300 - DNA, 21 bp, synthetic construct
  misc_feature 1..21: note = Description of Artificial Sequence: Synthetic oligonucleotide
  source 1..21: mol_type = other DNA
atgccccaccccagcagcaaa

SEQ ID NO: 45301 - DNA, 21 bp, synthetic construct
  misc_feature 1..21: note = Description of Artificial Sequence: Synthetic oligonucleotide
  source 1..21: mol_type = other DNA
tctcatggtcctcagattact

SEQ ID NO: 45302 - DNA, 21 bp, synthetic construct
  misc_feature 1..21: note = Description of Artificial Sequence: Synthetic oligonucleotide
  source 1..21: mol_type = other DNA
gaaggcggcaccagaaactgc

SEQ ID NO: 45303 - DNA, 21 bp, synthetic construct
  misc_feature 1..21: note = Description of Artificial Sequence: Synthetic oligonucleotide
  source 1..21: mol_type = other DNA
gagacgaggccggcgatttgt

SEQ ID NO: 45304 - DNA, 21 bp, synthetic construct
  misc_feature 1..21: note = Description of Artificial Sequence: Synthetic oligonucleotide
  source 1..21: mol_type = other DNA
aggcctcatgataatgataat

SEQ ID NO: 45305 - DNA, 21 bp, synthetic construct
  misc_feature 1..21: note = Description of Artificial Sequence: Synthetic oligonucleotide
  source 1..21: mol_type = other DNA
cggacgtctgagcatgatagg

SEQ ID NO: 45306 - DNA, 21 bp, synthetic construct
  misc_feature 1..21: note = Description of Artificial Sequence: Synthetic oligonucleotide
  source 1..21: mol_type = other DNA
accggcagcagcagcagccaa

SEQ ID NO: 45307 - DNA, 21 bp, synthetic construct
  misc_feature 1..21: note = Description of Artificial Sequence: Synthetic oligonucleotide
  source 1..21: mol_type = other DNA
ttcgccagcagacccgtccaa

SEQ ID NO: 45308 - DNA, 21 bp, synthetic construct
  misc_feature 1..21: note = Description of Artificial Sequence: Synthetic oligonucleotide
  source 1..21: mol_type = other DNA
ggggctcttcatacgagggat

SEQ ID NO: 45309 - DNA, 21 bp, synthetic construct
  misc_feature 1..21: note = Description of Artificial Sequence: Synthetic oligonucleotide
  source 1..21: mol_type = other DNA
atgccgagtcagagggatggt

SEQ ID NO: 45310 - DNA, 21 bp, synthetic construct
  misc_feature 1..21: note = Description of Artificial Sequence: Synthetic oligonucleotide
  source 1..21: mol_type = other DNA
gctatggggtcgagtctgtct

SEQ ID NO: 45311 - DNA, 21 bp, synthetic construct
  misc_feature 1..21: note = Description of Artificial Sequence: Synthetic oligonucleotide
  source 1..21: mol_type = other DNA
gctatgtctgcttctcggaat

SEQ ID NO: 45312 - DNA, 21 bp, synthetic construct
  misc_feature 1..21: note = Description of Artificial Sequence: Synthetic oligonucleotide
  source 1..21: mol_type = other DNA
gttagtacgactcctgctttg

SEQ ID NO: 45313 - DNA, 21 bp, synthetic construct
  misc_feature 1..21: note = Description of Artificial Sequence: Synthetic oligonucleotide
  source 1..21: mol_type = other DNA
ggcaacaccggcagctaccaa

SEQ ID NO: 45314 - DNA, 21 bp, synthetic construct
  misc_feature 1..21: note = Description of Artificial Sequence: Synthetic oligonucleotide
  source 1..21: mol_type = other DNA
aacagaaaacacaccagcacc

SEQ ID NO: 45315 - DNA, 21 bp, synthetic construct
  misc_feature 1..21: note = Description of Artificial Sequence: Synthetic oligonucleotide
  source 1..21: mol_type = other DNA
ggcaacatcagcaccagcagc

SEQ ID NO: 45316 - DNA, 21 bp, synthetic construct
  misc_feature 1..21: note = Description of Artificial Sequence: Synthetic oligonucleotide
  source 1..21: mol_type = other DNA
agcatccaaagcgccgccgcc

SEQ ID NO: 45317 - DNA, 21 bp, synthetic construct
  misc_feature 1..21: note = Description of Artificial Sequence: Synthetic oligonucleotide
  source 1..21: mol_type = other DNA
aacgattctggacagaatcaa

SEQ ID NO: 45318 - DNA, 21 bp, synthetic construct
  misc_feature 1..21: note = Description of Artificial Sequence: Synthetic oligonucleotide
  source 1..21: mol_type = other DNA
aatacttctacgaatggtatt

SEQ ID NO: 45319 - DNA, 21 bp, synthetic construct
  misc_feature 1..21: note = Description of Artificial Sequence: Synthetic oligonucleotide
  source 1..21: mol_type = other DNA
atgagcacccacagcagcggc

SEQ ID NO: 45320 - DNA, 21 bp, synthetic construct
  misc_feature 1..21: note = Description of Artificial Sequence: Synthetic oligonucleotide
  source 1..21: mol_type = other DNA
aacggttctggacagaagcaa

SEQ ID NO: 45321 - DNA, 21 bp, synthetic construct
  misc_feature 1..21: note = Description of Artificial Sequence: Synthetic oligonucleotide
  source 1..21: mol_type = other DNA
tcgtttacgggtaatacggtg

SEQ ID NO: 45322 - DNA, 21 bp, synthetic construct
  misc_feature 1..21: note = Description of Artificial Sequence: Synthetic oligonucleotide
  source 1..21: mol_type = other DNA
gaactcgccgcccccagcaaa

SEQ ID NO: 45323 - DNA, 21 bp, synthetic construct
  misc_feature 1..21: note = Description of Artificial Sequence: Synthetic oligonucleotide
  source 1..21: mol_type = other DNA
ttcagcaacaacggcagccac

SEQ ID NO: 45324 - DNA, 21 bp, synthetic construct
  misc_feature 1..21: note = Description of Artificial Sequence: Synthetic oligonucleotide
  source 1..21: mol_type = other DNA
ctcaccgccgtcagccccaaa

SEQ ID NO: 45325 - DNA, 21 bp, synthetic construct
  misc_feature 1..21: note = Description of Artificial Sequence: Synthetic oligonucleotide
  source 1..21: mol_type = other DNA
aacgccagcaccgccaacatg

SEQ ID NO: 45326 - DNA, 21 bp, synthetic construct
  misc_feature 1..21: note = Description of Artificial Sequence: Synthetic oligonucleotide
  source 1..21: mol_type = other DNA
cacaccgacaccagcgccgtc

SEQ ID NO: 45327 - DNA, 21 bp, synthetic construct
  misc_feature 1..21: note = Description of Artificial Sequence: Synthetic oligonucleotide
  source 1..21: mol_type = other DNA
agcggcacccaaacctggagc

SEQ ID NO: 45328 - DNA, 21 bp, synthetic construct
  misc_feature 1..21: note = Description of Artificial Sequence: Synthetic oligonucleotide
  source 1..21: mol_type = other DNA
aacggttctggacagaatgaa

SEQ ID NO: 45329 - DNA, 21 bp, synthetic construct
  misc_feature 1..21: note = Description of Artificial Sequence: Synthetic oligonucleotide
  source 1..21: mol_type = other DNA
agttatccgcagcagagtgcg

SEQ ID NO: 45330 - DNA, 21 bp, synthetic construct
  misc_feature 1..21: note = Description of Artificial Sequence: Synthetic oligonucleotide
  source 1..21: mol_type = other DNA
ccgatgggtactgggaggggc

SEQ ID NO: 45331 - DNA, 21 bp, synthetic construct
  misc_feature 1..21: note = Description of Artificial Sequence: Synthetic oligonucleotide
  source 1..21: mol_type = other DNA
ggcggcgtccccagcagactc

SEQ ID NO: 45332 - DNA, 21 bp, synthetic construct
  misc_feature 1..21: note = Description of Artificial Sequence: Synthetic oligonucleotide
  source 1..21: mol_type = other DNA
ggcgtcaacaccggcacccaa

SEQ ID NO: 45333 - DNA, 21 bp, synthetic construct
  misc_feature 1..21: note = Description of Artificial Sequence: Synthetic oligonucleotide
  source 1..21: mol_type = other DNA
ctcaaccaacacagcagcctc

SEQ ID NO: 45334 - DNA, 21 bp, synthetic construct
  misc_feature 1..21: note = Description of Artificial Sequence: Synthetic oligonucleotide
  source 1..21: mol_type = other DNA
tcgcgtgagtcgagtccgctt

SEQ ID NO: 45335 - DNA, 21 bp, synthetic construct
  misc_feature 1..21: note = Description of Artificial Sequence: Synthetic oligonucleotide
  source 1..21: mol_type = other DNA
aacggttctggacagaatcca

SEQ ID NO: 45336 - DNA, 21 bp, synthetic construct
  misc_feature 1..21: note = Description of Artificial Sequence: Synthetic oligonucleotide
  source 1..21: mol_type = other DNA
agcgacgtcagactcagcggc

SEQ ID NO: 45337 - DNA, 21 bp, synthetic construct
  misc_feature 1..21: note = Description of Artificial Sequence: Synthetic oligonucleotide
  source 1..21: mol_type = other DNA
cagggttcgagtaagacgact

SEQ ID NO: 45338 - DNA, 21 bp, synthetic construct
  misc_feature 1..21: note = Description of Artificial Sequence: Synthetic oligonucleotide
  source 1..21: mol_type = other DNA
aacggttctggacagaataaa

SEQ ID NO: 45339 - DNA, 21 bp, synthetic construct
  misc_feature 1..21: note = Description of Artificial Sequence: Synthetic oligonucleotide
  source 1..21: mol_type = other DNA
accagcagcaccaccagcctc

SEQ ID NO: 45340 - DNA, 21 bp, synthetic construct
  misc_feature 1..21: note = Description of Artificial Sequence: Synthetic oligonucleotide
  source 1..21: mol_type = other DNA
ggcacccaaaaacaaaccagc

SEQ ID NO: 45341 - DNA, 21 bp, synthetic construct
  misc_feature 1..21: note = Description of Artificial Sequence: Synthetic oligonucleotide
  source 1..21: mol_type = other DNA
aacggttctgtacagaatcaa

SEQ ID NO: 45342 - DNA, 21 bp, synthetic construct
  misc_feature 1..21: note = Description of Artificial Sequence: Synthetic oligonucleotide
  source 1..21: mol_type = other DNA
acttctcggcagtcttttgtg

SEQ ID NO: 45343 - DNA, 21 bp, synthetic construct
  misc_feature 1..21: note = Description of Artificial Sequence: Synthetic oligonucleotide
  source 1..21: mol_type = other DNA
aactggtctggacagaatcaa

SEQ ID NO: 45344 - DNA, 21 bp, synthetic construct
  misc_feature 1..21: note = Description of Artificial Sequence: Synthetic oligonucleotide
  source 1..21: mol_type = other DNA
aacggttctggacagagtcaa

SEQ ID NO: 45345 - DNA, 21 bp, synthetic construct
  misc_feature 1..21: note = Description of Artificial Sequence: Synthetic oligonucleotide
  source 1..21: mol_type = other DNA
atgactactcagttgaatagt

SEQ ID NO: 45346 - DNA, 21 bp, synthetic construct
  misc_feature 1..21: note = Description of Artificial Sequence: Synthetic oligonucleotide
  source 1..21: mol_type = other DNA
ccgattcatccgtcgagtggg

SEQ ID NO: 45347 - DNA, 21 bp, synthetic construct
  misc_feature 1..21: note = Description of Artificial Sequence: Synthetic oligonucleotide
  source 1..21: mol_type = other DNA
gagtctcctaatcttcattcg

SEQ ID NO: 45348 - DNA, 21 bp, synthetic construct
  misc_feature 1..21: note = Description of Artificial Sequence: Synthetic oligonucleotide
  source 1..21: mol_type = other DNA
ttttctcagcattcttctaat

SEQ ID NO: 45349 - DNA, 21 bp, synthetic construct
  misc_feature 1..21: note = Description of Artificial Sequence: Synthetic oligonucleotide
  source 1..21: mol_type = other DNA
gttcattatagtactactaat

SEQ ID NO: 45350 - DNA, 21 bp, synthetic construct
  misc_feature 1..21: note = Description of Artificial Sequence: Synthetic oligonucleotide
  source 1..21: mol_type = other DNA
tgtgcgacgtcttcgaggaag

SEQ ID NO: 45351 - DNA, 21 bp, synthetic construct
  misc_feature 1..21: note = Description of Artificial Sequence: Synthetic oligonucleotide
  source 1..21: mol_type = other DNA
cccgtcagagaaggcagcatc

SEQ ID NO: 45352 - DNA, 21 bp, synthetic construct
  misc_feature 1..21: note = Description of Artificial Sequence: Synthetic oligonucleotide
  source 1..21: mol_type = other DNA
aacggttctggaccgaatcaa

SEQ ID NO: 45353 - DNA, 21 bp, synthetic construct
  misc_feature 1..21: note = Description of Artificial Sequence: Synthetic oligonucleotide
  source 1..21: mol_type = other DNA
tcgagtccggctaatatggcg

SEQ ID NO: 45354 - DNA, 21 bp, synthetic construct
  misc_feature 1..21: note = Description of Artificial Sequence: Synthetic oligonucleotide
  source 1..21: mol_type = other DNA
gaaggcctcaacaccagcaga

SEQ ID NO: 45355 - DNA, 21 bp, synthetic construct
  misc_feature 1..21: note = Description of Artificial Sequence: Synthetic oligonucleotide
  source 1..21: mol_type = other DNA
caagtcaccgtcagacccgtc

SEQ ID NO: 45356 - DNA, 21 bp, synthetic construct
  misc_feature 1..21: note = Description of Artificial Sequence: Synthetic oligonucleotide
  source 1..21: mol_type = other DNA
tatgggagtgagtcgaataag

SEQ ID NO: 45357 - DNA, 21 bp, synthetic construct
  misc_feature 1..21: note = Description of Artificial Sequence: Synthetic oligonucleotide
  source 1..21: mol_type = other DNA
aatagtgaggcgaggcttagt

SEQ ID NO: 45358 - DNA, 21 bp, synthetic construct
  misc_feature 1..21: note = Description of Artificial Sequence: Synthetic oligonucleotide
  source 1..21: mol_type = other DNA
ggccccagccaacacgtcatc

SEQ ID NO: 45359 - DNA, 21 bp, synthetic construct
  misc_feature 1..21: note = Description of Artificial Sequence: Synthetic oligonucleotide
  source 1..21: mol_type = other DNA
tacggttctggacagaatcaa

SEQ ID NO: 45360 - DNA, 21 bp, synthetic construct
  misc_feature 1..21: note = Description of Artificial Sequence: Synthetic oligonucleotide
  source 1..21: mol_type = other DNA
actcagggtgcgagtaatttg

SEQ ID NO: 45361 - DNA, 21 bp, synthetic construct
  misc_feature 1..21: note = Description of Artificial Sequence: Synthetic oligonucleotide
  source 1..21: mol_type = other DNA
atgaccctcagcggccaaacc

SEQ ID NO: 45362 - DNA, 21 bp, synthetic construct
  misc_feature 1..21: note = Description of Artificial Sequence: Synthetic oligonucleotide
  source 1..21: mol_type = other DNA
gacagacacaacaccaccagc

SEQ ID NO: 45363 - DNA, 21 bp, synthetic construct
  misc_feature 1..21: note = Description of Artificial Sequence: Synthetic oligonucleotide
  source 1..21: mol_type = other DNA
atcatcggcagcagacacacc

SEQ ID NO: 45364 - DNA, 21 bp, synthetic construct
  misc_feature 1..21: note = Description of Artificial Sequence: Synthetic oligonucleotide
  source 1..21: mol_type = other DNA
agagacagaagcgtcgccagc

SEQ ID NO: 45365 - DNA, 21 bp, synthetic construct
  misc_feature 1..21: note = Description of Artificial Sequence: Synthetic oligonucleotide
  source 1..21: mol_type = other DNA
gccggcaacatgccccacagc

SEQ ID NO: 45366 - DNA, 21 bp, synthetic construct
  misc_feature 1..21: note = Description of Artificial Sequence: Synthetic oligonucleotide
  source 1..21: mol_type = other DNA
ggcggcagcgccaccgccgtc

SEQ ID NO: 45367 - DNA, 21 bp, synthetic construct
  misc_feature 1..21: note = Description of Artificial Sequence: Synthetic oligonucleotide
  source 1..21: mol_type = other DNA
accagcagcggcggcctcacc

SEQ ID NO: 45368 - DNA, 21 bp, synthetic construct
  misc_feature 1..21: note = Description of Artificial Sequence: Synthetic oligonucleotide
  source 1..21: mol_type = other DNA
ggcaccagccccagcaccatg

SEQ ID NO: 45369 - DNA, 21 bp, synthetic construct
  misc_feature 1..21: note = Description of Artificial Sequence: Synthetic oligonucleotide
  source 1..21: mol_type = other DNA
gccaacggcaccaaaagcagc

SEQ ID NO: 45370 - DNA, 21 bp, synthetic construct
  misc_feature 1..21: note = Description of Artificial Sequence: Synthetic oligonucleotide
  source 1..21: mol_type = other DNA
agcagcctcaaacccaccctc

SEQ ID NO: 45371 - DNA, 21 bp, synthetic construct
  misc_feature 1..21: note = Description of Artificial Sequence: Synthetic oligonucleotide
  source 1..21: mol_type = other DNA
gttggttcggatagttctacg

SEQ ID NO: 45372 - DNA, 21 bp, synthetic construct
  misc_feature 1..21: note = Description of Artificial Sequence: Synthetic oligonucleotide
  source 1..21: mol_type = other DNA
aacggttatggacagaatcaa

SEQ ID NO: 45373 - DNA, 21 bp, synthetic construct
  misc_feature 1..21: note = Description of Artificial Sequence: Synthetic oligonucleotide
  source 1..21: mol_type = other DNA
agagacgccaccagcatcggc

SEQ ID NO: 45374 - DNA, 21 bp, synthetic construct
  misc_feature 1..21: note = Description of Artificial Sequence: Synthetic oligonucleotide
  source 1..21: mol_type = other DNA
accggttctggacagaatcaa

SEQ ID NO: 45375 - DNA, 21 bp, synthetic construct
  misc_feature 1..21: note = Description of Artificial Sequence: Synthetic oligonucleotide
  source 1..21: mol_type = other DNA
aacggttttggacagaatcaa

SEQ ID NO: 45376 - DNA, 21 bp, synthetic construct
  misc_feature 1..21: note = Description of Artificial Sequence: Synthetic oligonucleotide
  source 1..21: mol_type = other DNA
acgcagtcttctactcggtcg

SEQ ID NO: 45377 - DNA, 21 bp, synthetic construct
  misc_feature 1..21: note = Description of Artificial Sequence: Synthetic oligonucleotide
  source 1..21: mol_type = other DNA
aatacgacgggtcatgctggg

SEQ ID NO: 45378 - DNA, 21 bp, synthetic construct
  misc_feature 1..21: note = Description of Artificial Sequence: Synthetic oligonucleotide
  source 1..21: mol_type = other DNA
ttggggactagtactattttg

SEQ ID NO: 45379 - DNA, 21 bp, synthetic construct
  misc_feature 1..21: note = Description of Artificial Sequence: Synthetic oligonucleotide
  source 1..21: mol_type = other DNA
cccagcacccccaccatcaaa

SEQ ID NO: 45380 - DNA, 21 bp, synthetic construct
  misc_feature 1..21: note = Description of Artificial Sequence: Synthetic oligonucleotide
  source 1..21: mol_type = other DNA
cacctcgcctacgacaacaac

SEQ ID NO: 45381 - DNA, 21 bp, synthetic construct
  misc_feature 1..21: note = Description of Artificial Sequence: Synthetic oligonucleotide
  source 1..21: mol_type = other DNA
gaaaacgaccacaacgtcaga

SEQ ID NO: 45382 - DNA, 21 bp, synthetic construct
  misc_feature 1..21: note = Description of Artificial Sequence: Synthetic oligonucleotide
  source 1..21: mol_type = other DNA
gccaccggcagccccagcaaa

SEQ ID NO: 45383 - DNA, 21 bp, synthetic construct
  misc_feature 1..21: note = Description of Artificial Sequence: Synthetic oligonucleotide
  source 1..21: mol_type = other DNA
aattctagtcataattcgcct

SEQ ID NO: 45384 - DNA, 21 bp, synthetic construct
  misc_feature 1..21: note = Description of Artificial Sequence: Synthetic oligonucleotide
  source 1..21: mol_type = other DNA
ggctggaaccacgaaaacgtc

SEQ ID NO: 45385 - DNA, 21 bp, synthetic construct
  misc_feature 1..21: note = Description of Artificial Sequence: Synthetic oligonucleotide
  source 1..21: mol_type = other DNA
gtcagcagccccagaatgagc

SEQ ID NO: 45386 - DNA, 21 bp, synthetic construct
  misc_feature 1..21: note = Description of Artificial Sequence: Synthetic oligonucleotide
  source 1..21: mol_type = other DNA
aacggtgctggacagaatcaa

SEQ ID NO: 45387 - DNA, 21 bp, synthetic construct
  misc_feature 1..21: note = Description of Artificial Sequence: Synthetic oligonucleotide
  source 1..21: mol_type = other DNA
cccagccacaaccccaccaac

SEQ ID NO: 45388 - DNA, 21 bp, synthetic construct
  misc_feature 1..21: note = Description of Artificial Sequence: Synthetic oligonucleotide
  source 1..21: mol_type = other DNA
ggcagccaccaccccagcggc

SEQ ID NO: 45389 - DNA, 21 bp, synthetic construct
  misc_feature 1..21: note = Description of Artificial Sequence: Synthetic oligonucleotide
  source 1..21: mol_type = other DNA
aacggcagaggcagcgacgtc

SEQ ID NO: 45390 - DNA, 21 bp, synthetic construct
  misc_feature 1..21: note = Description of Artificial Sequence: Synthetic oligonucleotide
  source 1..21: mol_type = other DNA
gccggcagcaacagccaaggc

SEQ ID NO: 45391 - DNA, 21 bp, synthetic construct
  misc_feature 1..21: note = Description of Artificial Sequence: Synthetic oligonucleotide
  source 1..21: mol_type = other DNA
aacggttctggacagattcaa

SEQ ID NO: 45392 - DNA, 21 bp, synthetic construct
  misc_feature 1..21: note = Description of Artificial Sequence: Synthetic oligonucleotide
  source 1..21: mol_type = other DNA
ggtggtcttgatcatcatgct

SEQ ID NO: 45393 - DNA, 21 bp, synthetic construct
  misc_feature 1..21: note = Description of Artificial Sequence: Synthetic oligonucleotide
  source 1..21: mol_type = other DNA
ttcagcagcaaaaccagcccc

SEQ ID NO: 45394 - DNA, 21 bp, synthetic construct
  misc_feature 1..21: note = Description of Artificial Sequence: Synthetic oligonucleotide
  source 1..21: mol_type = other DNA
aacggttctagacagaatcaa

SEQ ID NO: 45395 - DNA, 21 bp, synthetic construct
  misc_feature 1..21: note = Description of Artificial Sequence: Synthetic oligonucleotide
  source 1..21: mol_type = other DNA
actattaagtctgttactaat

SEQ ID NO: 45396 - DNA, 21 bp, synthetic construct
  misc_feature 1..21: note = Description of Artificial Sequence: Synthetic oligonucleotide
  source 1..21: mol_type = other DNA
cacagcacccccagcaccatg

SEQ ID NO: 45397 - DNA, 21 bp, synthetic construct
  misc_feature 1..21: note = Description of Artificial Sequence: Synthetic oligonucleotide
  source 1..21: mol_type = other DNA
aacagttctggacagaatcaa

SEQ ID NO: 45398 - DNA, 21 bp, synthetic construct
  misc_feature 1..21: note = Description of Artificial Sequence: Synthetic oligonucleotide
  source 1..21: mol_type = other DNA
aacggttctggaacgaatcaa

SEQ ID NO: 45399 - DNA, 21 bp, synthetic construct
  misc_feature 1..21: note = Description of Artificial Sequence: Synthetic oligonucleotide
  source 1..21: mol_type = other DNA
aagaatcatacggcggttcag

SEQ ID NO: 45400 - DNA, 21 bp, synthetic construct
  misc_feature 1..21: note = Description of Artificial Sequence: Synthetic oligonucleotide
  source 1..21: mol_type = other DNA
caccacgacgccagccccaac

SEQ ID NO: 45401 - DNA, 21 bp, synthetic construct
  misc_feature 1..21: note = Description of Artificial Sequence: Synthetic oligonucleotide
  source 1..21: mol_type = other DNA
ggggggtcgaattctaggctg

SEQ ID NO: 45402 - DNA, 21 bp, synthetic construct
  misc_feature 1..21: note = Description of Artificial Sequence: Synthetic oligonucleotide
  source 1..21: mol_type = other DNA
cacagagaagccagactcctc

SEQ ID NO: 45403 - DNA, 21 bp, synthetic construct
  misc_feature 1..21: note = Description of Artificial Sequence: Synthetic oligonucleotide
  source 1..21: mol_type = other DNA
agtgcgagtggtaataggtgt

SEQ ID NO: 45404 - DNA, 21 bp, synthetic construct
  misc_feature 1..21: note = Description of Artificial Sequence: Synthetic oligonucleotide
  source 1..21: mol_type = other DNA
ggtccgaatcagtcgggtcgg

SEQ ID NO: 45405 - DNA, 21 bp, synthetic construct
  misc_feature 1..21: note = Description of Artificial Sequence: Synthetic oligonucleotide
  source 1..21: mol_type = other DNA
gatgcgactaagaatcattcg

SEQ ID NO: 45406 - DNA, 21 bp, synthetic construct
  misc_feature 1..21: note = Description of Artificial Sequence: Synthetic oligonucleotide
  source 1..21: mol_type = other DNA
gacagcaccctcggccaaagc

SEQ ID NO: 45407 - DNA, 21 bp, synthetic construct
  misc_feature 1..21: note = Description of Artificial Sequence: Synthetic oligonucleotide
  source 1..21: mol_type = other DNA
ggtacggggactcctaggact

SEQ ID NO: 45408 - DNA, 21 bp, synthetic construct
  misc_feature 1..21: note = Description of Artificial Sequence: Synthetic oligonucleotide
  source 1..21: mol_type = other DNA
aacggttctggacataatcaa

SEQ ID NO: 45409 - DNA, 21 bp, synthetic construct
  misc_feature 1..21: note = Description of Artificial Sequence: Synthetic oligonucleotide
  source 1..21: mol_type = other DNA
aacggttctggacagaatcga

SEQ ID NO: 45410 - DNA, 21 bp, synthetic construct
  misc_feature 1..21: note = Description of Artificial Sequence: Synthetic oligonucleotide
  source 1..21: mol_type = other DNA
aattcgagttcgtctaatcat

SEQ ID NO: 45411 - DNA, 21 bp, synthetic construct
  misc_feature 1..21: note = Description of Artificial Sequence: Synthetic oligonucleotide
  source 1..21: mol_type = other DNA
aacggttctggacagtatcaa

SEQ ID NO: 45412 - DNA, 21 bp, synthetic construct
  misc_feature 1..21: note = Description of Artificial Sequence: Synthetic oligonucleotide
  source 1..21: mol_type = other DNA
gaaagaagcaccagaatgcaa

SEQ ID NO: 45413 - DNA, 21 bp, synthetic construct
  misc_feature 1..21: note = Description of Artificial Sequence: Synthetic oligonucleotide
  source 1..21: mol_type = other DNA
cagttgccggctttgcagggt

SEQ ID NO: 45414 - DNA, 21 bp, synthetic construct
  misc_feature 1..21: note = Description of Artificial Sequence: Synthetic oligonucleotide
  source 1..21: mol_type = other DNA
atggctcatgatggttatcgg

SEQ ID NO: 45415 - DNA, 21 bp, synthetic construct
  misc_feature 1..21: note = Description of Artificial Sequence: Synthetic oligonucleotide
  source 1..21: mol_type = other DNA
tacagcaaacaaaacctcacc

SEQ ID NO: 45416 - DNA, 21 bp, synthetic construct
  misc_feature 1..21: note = Description of Artificial Sequence: Synthetic oligonucleotide
  source 1..21: mol_type = other DNA
agtgcttctaatgttagtagg

SEQ ID NO: 45417 - DNA, 21 bp, synthetic construct
  misc_feature 1..21: note = Description of Artificial Sequence: Synthetic oligonucleotide
  source 1..21: mol_type = other DNA
aacggttctgaacagaatcaa

SEQ ID NO: 45418 - DNA, 21 bp, synthetic construct
  misc_feature 1..21: note = Description of Artificial Sequence: Synthetic oligonucleotide
  source 1..21: mol_type = other DNA
gctacggtgggtcatatgact

SEQ ID NO: 45419 - DNA, 21 bp, synthetic construct
  misc_feature 1..21: note = Description of Artificial Sequence: Synthetic oligonucleotide
  source 1..21: mol_type = other DNA
agtacttctagttcggctagt

SEQ ID NO: 45420 - DNA, 21 bp, synthetic construct
  misc_feature 1..21: note = Description of Artificial Sequence: Synthetic oligonucleotide
  source 1..21: mol_type = other DNA
gccagcagagacagcagcgtc

SEQ ID NO: 45421 - DNA, 21 bp, synthetic construct
  misc_feature 1..21: note = Description of Artificial Sequence: Synthetic oligonucleotide
  source 1..21: mol_type = other DNA
tctgagcatcagcctctttcg

SEQ ID NO: 45422 - DNA, 21 bp, synthetic construct
  misc_feature 1..21: note = Description of Artificial Sequence: Synthetic oligonucleotide
  source 1..21: mol_type = other DNA
atccaacaaggcagcagaacc

SEQ ID NO: 45423 - DNA, 21 bp, synthetic construct
  misc_feature 1..21: note = Description of Artificial Sequence: Synthetic oligonucleotide
  source 1..21: mol_type = other DNA
atgctccccagcgtcagcggc

SEQ ID NO: 45424 - DNA, 21 bp, synthetic construct
  misc_feature 1..21: note = Description of Artificial Sequence: Synthetic oligonucleotide
  source 1..21: mol_type = other DNA
tcttctacgagtagtccgtat

SEQ ID NO: 45425 - DNA, 21 bp, synthetic construct
  misc_feature 1..21: note = Description of Artificial Sequence: Synthetic oligonucleotide
  source 1..21: mol_type = other DNA
atgaggcaggatacgagtaag

SEQ ID NO: 45426 - DNA, 21 bp, synthetic construct
  misc_feature 1..21: note = Description of Artificial Sequence: Synthetic oligonucleotide
  source 1..21: mol_type = other DNA
tctaatgtgtcgaagccgcag

SEQ ID NO: 45427 - DNA, 21 bp, synthetic construct
  misc_feature 1..21: note = Description of Artificial Sequence: Synthetic oligonucleotide
  source 1..21: mol_type = other DNA
accagaggcagccccctcatg

SEQ ID NO: 45428 - DNA, 21 bp, synthetic construct
  misc_feature 1..21: note = Description of Artificial Sequence: Synthetic oligonucleotide
  source 1..21: mol_type = other DNA
caccccaccagccccgccatg

SEQ ID NO: 45429 - DNA, 21 bp, synthetic construct
  misc_feature 1..21: note = Description of Artificial Sequence: Synthetic oligonucleotide
  source 1..21: mol_type = other DNA
aacggttctggactgaatcaa

SEQ ID NO: 45430 - DNA, 21 bp, synthetic construct
  misc_feature 1..21: note = Description of Artificial Sequence: Synthetic oligonucleotide
  source 1..21: mol_type = other DNA
aaaagagacgcccacaccgcc

SEQ ID NO: 45431 - DNA, 21 bp, synthetic construct
  misc_feature 1..21: note = Description of Artificial Sequence: Synthetic oligonucleotide
  source 1..21: mol_type = other DNA
cttcttggggatacgaagccg

SEQ ID NO: 45432 - DNA, 21 bp, synthetic construct
  misc_feature 1..21: note = Description of Artificial Sequence: Synthetic oligonucleotide
  source 1..21: mol_type = other DNA
tacagcagagtccaaagcgaa

SEQ ID NO: 45433 - DNA, 21 bp, synthetic construct
  misc_feature 1..21: note = Description of Artificial Sequence: Synthetic oligonucleotide
  source 1..21: mol_type = other DNA
gacgtcctcagcaaaagacaa

SEQ ID NO: 45434 - DNA, 21 bp, synthetic construct
  misc_feature 1..21: note = Description of Artificial Sequence: Synthetic oligonucleotide
  source 1..21: mol_type = other DNA
agagacggcaccccccccacc

SEQ ID NO: 45435 - DNA, 21 bp, synthetic construct
  misc_feature 1..21: note = Description of Artificial Sequence: Synthetic oligonucleotide
  source 1..21: mol_type = other DNA
agccaccccagcagcttcggc

SEQ ID NO: 45436 - DNA, 21 bp, synthetic construct
  misc_feature 1..21: note = Description of Artificial Sequence: Synthetic oligonucleotide
  source 1..21: mol_type = other DNA
agcggcgccagcagcaacagc

SEQ ID NO: 45437 - DNA, 21 bp, synthetic construct
  misc_feature 1..21: note = Description of Artificial Sequence: Synthetic oligonucleotide
  source 1..21: mol_type = other DNA
tctgcttctcgttctgcgtat

SEQ ID NO: 45438 - DNA, 21 bp, synthetic construct
  misc_feature 1..21: note = Description of Artificial Sequence: Synthetic oligonucleotide
  source 1..21: mol_type = other DNA
agcaccagcaacggcaccctc

SEQ ID NO: 45439 - DNA, 21 bp, synthetic construct
  misc_feature 1..21: note = Description of Artificial Sequence: Synthetic oligonucleotide
  source 1..21: mol_type = other DNA
agccacacccccaaactcgtc

SEQ ID NO: 45440 - DNA, 21 bp, synthetic construct
  misc_feature 1..21: note = Description of Artificial Sequence: Synthetic oligonucleotide
  source 1..21: mol_type = other DNA
ggccaagtcagccaaatgaaa

SEQ ID NO: 45441 - DNA, 21 bp, synthetic construct
  misc_feature 1..21: note = Description of Artificial Sequence: Synthetic oligonucleotide
  source 1..21: mol_type = other DNA
agcagccacagcgacaccaga

SEQ ID NO: 45442 - DNA, 21 bp, synthetic construct
  misc_feature 1..21: note = Description of Artificial Sequence: Synthetic oligonucleotide
  source 1..21: mol_type = other DNA
caaagcgtcaaaacccccgaa

SEQ ID NO: 45443 - DNA, 21 bp, synthetic construct
  misc_feature 1..21: note = Description of Artificial Sequence: Synthetic oligonucleotide
  source 1..21: mol_type = other DNA
gacagaaaccacgccgccgaa

SEQ ID NO: 45444 - DNA, 21 bp, synthetic construct
  misc_feature 1..21: note = Description of Artificial Sequence: Synthetic oligonucleotide
  source 1..21: mol_type = other DNA
cctttgaatactcatcagtcg

SEQ ID NO: 45445 - DNA, 21 bp, synthetic construct
  misc_feature 1..21: note = Description of Artificial Sequence: Synthetic oligonucleotide
  source 1..21: mol_type = other DNA
agcagcagcgcccacagactc

SEQ ID NO: 45446 - DNA, 21 bp, synthetic construct
  misc_feature 1..21: note = Description of Artificial Sequence: Synthetic oligonucleotide
  source 1..21: mol_type = other DNA
aacgacagaggccaaaacggc

SEQ ID NO: 45447 - DNA, 21 bp, synthetic construct
  misc_feature 1..21: note = Description of Artificial Sequence: Synthetic oligonucleotide
  source 1..21: mol_type = other DNA
ggtcagacgatgtctacgatg

SEQ ID NO: 45448 - DNA, 21 bp, synthetic construct
  misc_feature 1..21: note = Description of Artificial Sequence: Synthetic oligonucleotide
  source 1..21: mol_type = other DNA
actaggcatatgcagcttagt

SEQ ID NO: 45449 - DNA, 21 bp, synthetic construct
  misc_feature 1..21: note = Description of Artificial Sequence: Synthetic oligonucleotide
  source 1..21: mol_type = other DNA
accggttctgaacagaatcaa

SEQ ID NO: 45450 - DNA, 21 bp, synthetic construct
  misc_feature 1..21: note = Description of Artificial Sequence: Synthetic oligonucleotide
  source 1..21: mol_type = other DNA
aacggttctggacataagcaa

SEQ ID NO: 45451 - DNA, 21 bp, synthetic construct
  misc_feature 1..21: note = Description of Artificial Sequence: Synthetic oligonucleotide
  source 1..21: mol_type = other DNA
attttgggtaataagtctagt

SEQ ID NO: 45452 - DNA, 21 bp, synthetic construct
  misc_feature 1..21: note = Description of Artificial Sequence: Synthetic oligonucleotide
  source 1..21: mol_type = other DNA
accggcgcccaaagcaccatg

SEQ ID NO: 45453 - DNA, 21 bp, synthetic construct
  misc_feature 1..21: note = Description of Artificial Sequence: Synthetic oligonucleotide
  source 1..21: mol_type = other DNA
gtccccgtcaccggcctcagc

SEQ ID NO: 45454 - DNA, 21 bp, synthetic construct
  misc_feature 1..21: note = Description of Artificial Sequence: Synthetic oligonucleotide
  source 1..21: mol_type = other DNA
gttcaggggagtcttccgtcg

SEQ ID NO: 45455 - DNA, 21 bp, synthetic construct
  misc_feature 1..21: note = Description of Artificial Sequence: Synthetic oligonucleotide
  source 1..21: mol_type = other DNA
tctgattctcggtcgggtatg

SEQ ID NO: 45456 - DNA, 21 bp, synthetic construct
  misc_feature 1..21: note = Description of Artificial Sequence: Synthetic oligonucleotide
  source 1..21: mol_type = other DNA
cacgaaagaggccaaaacggc

SEQ ID NO: 45457 - DNA, 21 bp, synthetic construct
  misc_feature 1..21: note = Description of Artificial Sequence: Synthetic oligonucleotide
  source 1..21: mol_type = other DNA
ttgaatggtagtgctactgct

SEQ ID NO: 45458 - DNA, 21 bp, synthetic construct
  misc_feature 1..21: note = Description of Artificial Sequence: Synthetic oligonucleotide
  source 1..21: mol_type = other DNA
agaatggccagacccgccgtc

SEQ ID NO: 45459 - DNA, 21 bp, synthetic construct
  misc_feature 1..21: note = Description of Artificial Sequence: Synthetic oligonucleotide
  source 1..21: mol_type = other DNA
aggagtatttctagtgcggtg

SEQ ID NO: 45460 - DNA, 21 bp, synthetic construct
  misc_feature 1..21: note = Description of Artificial Sequence: Synthetic oligonucleotide
  source 1..21: mol_type = other DNA
aatgagcaggctaagttgacg

SEQ ID NO: 45461 - DNA, 21 bp, synthetic construct
  misc_feature 1..21: note = Description of Artificial Sequence: Synthetic oligonucleotide
  source 1..21: mol_type = other DNA
agcagcggcggcaacatgagc

SEQ ID NO: 45462 - DNA, 21 bp, synthetic construct
  misc_feature 1..21: note = Description of Artificial Sequence: Synthetic oligonucleotide
  source 1..21: mol_type = other DNA
aacgccaccagccccagaaaa

SEQ ID NO: 45463 - DNA, 21 bp, synthetic construct
  misc_feature 1..21: note = Description of Artificial Sequence: Synthetic oligonucleotide
  source 1..21: mol_type = other DNA
tcgggtgcggggtcggctggg

SEQ ID NO: 45464 - DNA, 21 bp, synthetic construct
  misc_feature 1..21: note = Description of Artificial Sequence: Synthetic oligonucleotide
  source 1..21: mol_type = other DNA
atcggttctggacagaatcaa

SEQ ID NO: 45465 - DNA, 21 bp, synthetic construct
  misc_feature 1..21: note = Description of Artificial Sequence: Synthetic oligonucleotide
  source 1..21: mol_type = other DNA
aataatggggcttcggttgtg

SEQ ID NO: 45466 - DNA, 21 bp, synthetic construct
  misc_feature 1..21: note = Description of Artificial Sequence: Synthetic oligonucleotide
  source 1..21: mol_type = other DNA
tctgggtctgggattatgatg

SEQ ID NO: 45467 - DNA, 21 bp, synthetic construct
  misc_feature 1..21: note = Description of Artificial Sequence: Synthetic oligonucleotide
  source 1..21: mol_type = other DNA
cccacccacagcagcagagac

SEQ ID NO: 45468 - DNA, 21 bp, synthetic construct
  misc_feature 1..21: note = Description of Artificial Sequence: Synthetic oligonucleotide
  source 1..21: mol_type = other DNA
aacaggtctggacagaatcaa

SEQ ID NO: 45469 - DNA, 21 bp, synthetic construct
  misc_feature 1..21: note = Description of Artificial Sequence: Synthetic oligonucleotide
  source 1..21: mol_type = other DNA
agcaacagcgacagagccaac

SEQ ID NO: 45470 - DNA, 21 bp, synthetic construct
  misc_feature 1..21: note = Description of Artificial Sequence: Synthetic oligonucleotide
  source 1..21: mol_type = other DNA
gttaatgagaatcgggtttcg

SEQ ID NO: 45471 - DNA, 21 bp, synthetic construct
  misc_feature 1..21: note = Description of Artificial Sequence: Synthetic oligonucleotide
  source 1..21: mol_type = other DNA
gggcgggagagtaatctgagt

SEQ ID NO: 45472 - DNA, 21 bp, synthetic construct
  misc_feature 1..21: note = Description of Artificial Sequence: Synthetic oligonucleotide
  source 1..21: mol_type = other DNA
cagggtcctaagaatgctgat

SEQ ID NO: 45473 - DNA, 21 bp, synthetic construct
  misc_feature 1..21: note = Description of Artificial Sequence: Synthetic oligonucleotide
  source 1..21: mol_type = other DNA
agtaataatggtactcagaag

SEQ ID NO: 45474 - DNA, 21 bp, synthetic construct
  misc_feature 1..21: note = Description of Artificial Sequence: Synthetic oligonucleotide
  source 1..21: mol_type = other DNA
gatgcgcgtactatggcggct

SEQ ID NO: 45475 - protein, 7 aa, synthetic construct
  REGION 1..7: note = Description of Artificial Sequence: Synthetic peptide
SINTKTN

SEQ ID NO: 45476 - protein, 7 aa, synthetic construct
  REGION 1..7: note = Description of Artificial Sequence: Synthetic peptide
KGPGQMG

SEQ ID NO: 45477 - protein, 7 aa, synthetic construct
  REGION 1..7: note = Description of Artificial Sequence: Synthetic peptide
TLAVPFK

SEQ ID NO: 45478 - protein, 7 aa, synthetic construct
  REGION 1..7: note = Description of Artificial Sequence: Synthetic peptide
NLAGRYA

SEQ ID NO: 45479 - protein, 7 aa, synthetic construct
  REGION 1..7: note = Description of Artificial Sequence: Synthetic peptide
ILGTGTS

SEQ ID NO: 45480 - protein, 7 aa, synthetic construct
  REGION 1..7: note = Description of Artificial Sequence: Synthetic peptide
QSSQTPR

SEQ ID NO: 45481 - protein, 7 aa, synthetic construct
  REGION 1..7: note = Description of Artificial Sequence: Synthetic peptide
  MOD_RES 1: note = Any amino acid other than T, S, or N
XLAVPFK

SEQ ID NO: 45482 - protein, 7 aa, synthetic construct
  REGION 1..7: note = Description of Artificial Sequence: Synthetic peptide
  MOD_RES 1: note = Any amino acid
  MOD_RES 2: note = Any amino acid other than L or V
XXAVPFK

SEQ ID NO: 45483 - protein, 7 aa, synthetic construct
  REGION 1..7: note = Description of Artificial Sequence: Synthetic peptide
  MOD_RES 1..2: note = Any amino acid
  MOD_RES 3: note = Any amino acid other than A, S, Q, P, and T
XXXVPFK

SEQ ID NO: 45484 - skipped

SEQ ID NO: 45485 - protein, 7 aa, synthetic construct
  REGION 1..7: note = Description of Artificial Sequence: Synthetic peptide
  MOD_RES 4: note = Any amino acid other than V, T, Q, N, L, and M
TLAXPFK

SEQ ID NO: 45486 - protein, 7 aa, synthetic construct
  REGION 1..7: note = Description of Artificial Sequence: Synthetic peptide
PKKKRKV

SEQ ID NO: 45487 - DNA, 28 bp, synthetic construct
  misc_feature 1..28: note = Description of Artificial Sequence: Synthetic oligonucleotide
  source 1..28: mol_type = other DNA
cttccagttcagctacgagtttgagaac

SEQ ID NO: 45488 - DNA, 32 bp, synthetic construct
  misc_feature 1..32: note = Description of Artificial Sequence: Synthetic oligonucleotide
  source 1..32: mol_type = other DNA
caagtaaaacctctacaaatgtggtaaaatcg

SEQ ID NO: 45489 - DNA, 44 bp, synthetic construct
  misc_feature 1..44: note = Description of Artificial Sequence: Synthetic oligonucleotide
  source 1..44: mol_type = other DNA
acgctcttccgatctaatacttgtactatctctctagaactatt

SEQ ID NO: 45490 - DNA, 37 bp, synthetic construct
  misc_feature 1..37: note = Description of Artificial Sequence: Synthetic oligonucleotide
  source 1..37: mol_type = other DNA
tgtgctcttccgatctcacactgaattttagcgtttg

SEQ ID NO: 45491 - protein, 7 aa, synthetic construct
  REGION 1..7: note = Description of Artificial Sequence: Synthetic peptide
QAVRTSL

SEQ ID NO: 45492-45493 - skipped (2 entries)

SEQ ID NO: 45494 - DNA, 10 bp, synthetic construct
  misc_feature 1..10: note = Description of Artificial Sequence: Synthetic oligonucleotide
  source 1..10: mol_type = other DNA
tattaacggt

SEQ ID NO: 45495 - DNA, 10 bp, synthetic construct
  misc_feature 1..10: note = Description of Artificial Sequence: Synthetic oligonucleotide
  source 1..10: mol_type = other DNA
aatcaacaac

SEQ ID NO: 45496 - protein, 11 aa, synthetic construct
  REGION 1..11: note = Description of Artificial Sequence: Synthetic peptide
TINGSGQNQQT

SEQ ID NO: 45497 - protein, 11 aa, synthetic construct
  REGION 1..11: note = Description of Artificial Sequence: Synthetic peptide
TINGSGQNQQT

SEQ ID NO: 45498 - protein, 11 aa, synthetic construct
  REGION 1..11: note = Description of Artificial Sequence: Synthetic peptide
TILQTSSPGQT

SEQ ID NO: 45499 - protein, 11 aa, synthetic construct
  REGION 1..11: note = Description of Artificial Sequence: Synthetic peptide
TIQQGKQSVQT

SEQ ID NO: 45500 - protein, 11 aa, synthetic construct
  REGION 1..11: note = Description of Artificial Sequence: Synthetic peptide
TISINTKTNQT

SEQ ID NO: 45501 - protein, 11 aa, synthetic construct
  REGION 1..11: note = Description of Artificial Sequence: Synthetic peptide
TISNGTKQTQT

SEQ ID NO: 45502 - protein, 11 aa, synthetic construct
  REGION 1..11: note = Description of Artificial Sequence: Synthetic peptide
TIGSGKTAAQT

SEQ ID NO: 45503 - protein, 11 aa, synthetic construct
  REGION 1..11: note = Description of Artificial Sequence: Synthetic peptide
TIMGDKPTRQT

SEQ ID NO: 45504 - protein, 11 aa, synthetic construct
  REGION 1..11: note = Description of Artificial Sequence: Synthetic peptide
TIDGAATKNQT

SEQ ID NO: 45505 - protein, 11 aa, synthetic construct
  REGION 1..11: note = Description of Artificial Sequence: Synthetic peptide
TIQPSGGNTQT

SEQ ID NO: 45506 - protein, 11 aa, synthetic construct
  REGION 1..11: note = Description of Artificial Sequence: Synthetic peptide
TIERGANTKQT

SEQ ID NO: 45507 - protein, 11 aa, synthetic construct
  REGION 1..11: note = Description of Artificial Sequence: Synthetic peptide
TITTGGHSSQT

SEQ ID NO: 45508 - protein, 11 aa, synthetic construct
  REGION 1..11: note = Description of Artificial Sequence: Synthetic peptide
TIGTTKTSEQT

SEQ ID NO: 45509 - protein, 11 aa, synthetic construct
  REGION 1..11: note = Description of Artificial Sequence: Synthetic peptide
TIGTGTSVLQT

SEQ ID NO: 45510 - protein, 11 aa, synthetic construct
  REGION 1..11: note = Description of Artificial Sequence: Synthetic peptide
TINQSGTKGQT

SEQ ID NO: 45511 - protein, 11 aa, synthetic construct
  REGION 1..11: note = Description of Artificial Sequence: Synthetic peptide
TIDGQSSKSQT

SEQ ID NO: 45512 - protein, 11 aa, synthetic construct
  REGION 1..11: note = Description of Artificial Sequence: Synthetic peptide
TIKGPGQMGQT

SEQ ID NO: 45513 - protein, 11 aa, synthetic construct
  REGION 1..11: note = Description of Artificial Sequence: Synthetic peptide
TIGTPSKAGQT

SEQ ID NO: 45514-46363 - skipped (850 entries)

SEQ ID NO: 46364 - DNA, 21 bp, synthetic construct
  misc_feature 1..21: note = Description of Artificial Sequence: Synthetic oligonucleotide
  source 1..21: mol_type = other DNA
gacggcgccgccaccaaaaac

SEQ ID NO: 46365 - DNA, 21 bp, synthetic construct
  misc_feature 1..21: note = Description of Artificial Sequence: Synthetic oligonucleotide
  source 1..21: mol_type = other DNA
gacggccaaagcagcaaaagc

SEQ ID NO: 46366 - DNA, 21 bp, synthetic construct
  misc_feature 1..21: note = Description of Artificial Sequence: Synthetic oligonucleotide
  source 1..21: mol_type = other DNA
ctccaaaccagcagccccggc

SEQ ID NO: 46367 - DNA, 21 bp, synthetic construct
  misc_feature 1..21: note = Description of Artificial Sequence: Synthetic oligonucleotide
  source 1..21: mol_type = other DNA
cagcagggtaagcagtcggtt

SEQ ID NO: 46368 - DNA, 21 bp, synthetic construct
  misc_feature 1..21: note = Description of Artificial Sequence: Synthetic oligonucleotide
  source 1..21: mol_type = other DNA
tctattaatactaagacgaat

SEQ ID NO: 46369 - DNA, 21 bp, synthetic construct
  misc_feature 1..21: note = Description of Artificial Sequence: Synthetic oligonucleotide
  source 1..21: mol_type = other DNA
tctaatgggactaagcagact

SEQ ID NO: 46370 - DNA, 21 bp, synthetic construct
  misc_feature 1..21: note = Description of Artificial Sequence: Synthetic oligonucleotide
  source 1..21: mol_type = other DNA
gggtcgggtaagactgctgcg

SEQ ID NO: 46371 - DNA, 21 bp, synthetic construct
  misc_feature 1..21: note = Description of Artificial Sequence: Synthetic oligonucleotide
  source 1..21: mol_type = other DNA
atgggggataagccgacgagg

SEQ ID NO: 46372 - DNA, 21 bp, synthetic construct
  misc_feature 1..21: note = Description of Artificial Sequence: Synthetic oligonucleotide
  source 1..21: mol_type = other DNA
cagcctagtgggggtaatact

SEQ ID NO: 46373 - DNA, 21 bp, synthetic construct
  misc_feature 1..21: note = Description of Artificial Sequence: Synthetic oligonucleotide
  source 1..21: mol_type = other DNA
gaaagaggcgccaacaccaaa

SEQ ID NO: 46374 - DNA, 21 bp, synthetic construct
  misc_feature 1..21: note = Description of Artificial Sequence: Synthetic oligonucleotide
  source 1..21: mol_type = other DNA
accaccggcggccacagcagc

SEQ ID NO: 46375 - DNA, 21 bp, synthetic construct
  misc_feature 1..21: note = Description of Artificial Sequence: Synthetic oligonucleotide
  source 1..21: mol_type = other DNA
ggtacgacgaagactagtgag

SEQ ID NO: 46376 - DNA, 21 bp, synthetic construct
  misc_feature 1..21: note = Description of Artificial Sequence: Synthetic oligonucleotide
  source 1..21: mol_type = other DNA
ggtactgggactagtgttctt

SEQ ID NO: 46377 - DNA, 21 bp, synthetic construct
  misc_feature 1..21: note = Description of Artificial Sequence: Synthetic oligonucleotide
  source 1..21: mol_type = other DNA
aatcagagtgggactaagggt

SEQ ID NO: 46378 - DNA, 21 bp, synthetic construct
  misc_feature 1..21: note = Description of Artificial Sequence: Synthetic oligonucleotide
  source 1..21: mol_type = other DNA
aagggtcctggtcagatgggt

SEQ ID NO: 46379 - DNA, 21 bp, synthetic construct
  misc_feature 1..21: note = Description of Artificial Sequence: Synthetic oligonucleotide
  source 1..21: mol_type = other DNA
ggcacccccagcaaagccggc

SEQ ID NO: 46380 - DNA, 21 bp, synthetic construct
  misc_feature 1..21: note = Description of Artificial Sequence: Synthetic oligonucleotide
  source 1..21: mol_type = other DNA
aaggataatactcctgggagg

SEQ ID NO: 46381 - DNA, 21 bp, synthetic construct
  misc_feature 1..21: note = Description of Artificial Sequence: Synthetic oligonucleotide
  source 1..21: mol_type = other DNA
aacaacctccccagaaacctc

SEQ ID NO: 46382 - DNA, 21 bp, synthetic construct
  misc_feature 1..21: note = Description of Artificial Sequence: Synthetic oligonucleotide
  source 1..21: mol_type = other DNA
agagaaagcagccccagcctc

SEQ ID NO: 46383 - DNA, 21 bp, synthetic construct
  misc_feature 1..21: note = Description of Artificial Sequence: Synthetic oligonucleotide
  source 1..21: mol_type = other DNA
cgtgttcctctttcgactatt

SEQ ID NO: 46384 - protein, 743 aa, synthetic construct
  REGION 1..743: note = Description of Artificial Sequence: Synthetic polypeptide
MAADGYLPDWLEDNLSEGIREWWALKPGAPQPKANQQHQDNARGLVLPGYKYLGPGNGLDKGEPVNAADAAALEHDKAYDQQLKAGDNPYLKYNHADAEFQERLKEDTSFGGNLGRAVFQAKKRLLEPLGLVEEAAKTAPGKKRPVEQSPQEPDSSAGIGKSGAQPAKKRLNFGQTGDTESVPDPQPIGEPPAAPSGVGSLTMASGGGAPVADNNEGADGVGSSSGNWHCDSQWLGDRVITTSTRTWALPTYNNHLYKQISNSTSGGSSNDNAYFGYSTPWGYFDFNRFHCHFSPRDWQRLINNNWGFRPKRLNFKLFNIQVKEVTDNNGVKTIANNLTSTVQVFTDSDYQLPYVLGSAHEGCLPPFPADVFMIPQYGYLTLNDGSQAVGRSSFYCLEYFPSQMLRTGNNFQFSYEFENVPFHSSYAHSQSLDRLMNPLIDQYLYYLSRTIDGAATKNQTLKFSVAGPSNMAVQGRNYIPGPSYRQQRVSTTVTQNNNSEFAWPGASSWALNGRNSLMNPGPAMASHKEGEDRFFPLSGSLIFGKQGTGRDNVDADKVMITNEEEIKTTNPVATESYGQVATNHQSDGTLAVPFKAQAQTGWVQNQGILPGMVWQDRDVYLQGPIWAKIPHTDGNFHPSPLMGGFGMKHPPPQILIKNTPVPADPPTAFNKDKLNSFITQYSTGQVSVEIEWELQKENSKRWNPEIQYTSNYYKSNNVEFAVNTEGVYSEPRPIGTRYLTRNL

SEQ ID NO: 46385 - protein, 743 aa, synthetic construct
  REGION 1..743: note = Description of Artificial Sequence: Synthetic polypeptide
MAADGYLPDWLEDNLSEGIREWWALKPGAPQPKANQQHQDNARGLVLPGYKYLGPGNGLDKGEPVNAADAAALEHDKAYDQQLKAGDNPYLKYNHADAEFQERLKEDTSFGGNLGRAVFQAKKRLLEPLGLVEEAAKTAPGKKRPVEQSPQEPDSSAGIGKSGAQPAKKRLNFGQTGDTESVPDPQPIGEPPAAPSGVGSLTMASGGGAPVADNNEGADGVGSSSGNWHCDSQWLGDRVITTSTRTWALPTYNNHLYKQISNSTSGGSSNDNAYFGYSTPWGYFDFNRFHCHFSPRDWQRLINNNWGFRPKRLNFKLFNIQVKEVTDNNGVKTIANNLTSTVQVFTDSDYQLPYVLGSAHEGCLPPFPADVFMIPQYGYLTLNDGSQAVGRSSFYCLEYFPSQMLRTGNNFQFSYEFENVPFHSSYAHSQSLDRLMNPLIDQYLYYLSRTIDGQSSKSQTLKFSVAGPSNMAVQGRNYIPGPSYRQQRVSTTVTQNNNSEFAWPGASSWALNGRNSLMNPGPAMASHKEGEDRFFPLSGSLIFGKQGTGRDNVDADKVMITNEEEIKTTNPVATESYGQVATNHQSDGTLAVPFKAQAQTGWVQNQGILPGMVWQDRDVYLQGPIWAKIPHTDGNFHPSPLMGGFGMKHPPPQILIKNTPVPADPPTAFNKDKLNSFITQYSTGQVSVEIEWELQKENSKRWNPEIQYTSNYYKSNNVEFAVNTEGVYSEPRPIGTRYLTRNL

SEQ ID NO: 46386 - protein, 743 aa, synthetic construct
  REGION 1..743: note = Description of Artificial Sequence: Synthetic polypeptide
MAADGYLPDWLEDNLSEGIREWWALKPGAPQPKANQQHQDNARGLVLPGYKYLGPGNGLDKGEPVNAADAAALEHDKAYDQQLKAGDNPYLKYNHADAEFQERLKEDTSFGGNLGRAVFQAKKRLLEPLGLVEEAAKTAPGKKRPVEQSPQEPDSSAGIGKSGAQPAKKRLNFGQTGDTESVPDPQPIGEPPAAPSGVGSLTMASGGGAPVADNNEGADGVGSSSGNWHCDSQWLGDRVITTSTRTWALPTYNNHLYKQISNSTSGGSSNDNAYFGYSTPWGYFDFNRFHCHFSPRDWQRLINNNWGFRPKRLNFKLFNIQVKEVTDNNGVKTIANNLTSTVQVFTDSDYQLPYVLGSAHEGCLPPFPADVFMIPQYGYLTLNDGSQAVGRSSFYCLEYFPSQMLRTGNNFQFSYEFENVPFHSSYAHSQSLDRLMNPLIDQYLYYLSRTILQTSSPGQTLKFSVAGPSNMAVQGRNYIPGPSYRQQRVSTTVTQNNNSEFAWPGASSWALNGRNSLMNPGPAMASHKEGEDRFFPLSGSLIFGKQGTGRDNVDADKVMITNEEEIKTTNPVATESYGQVATNHQSDGTLAVPFKAQAQTGWVQNQGILPGMVWQDRDVYLQGPIWAKIPHTDGNFHPSPLMGGFGMKHPPPQILIKNTPVPADPPTAFNKDKLNSFITQYSTGQVSVEIEWELQKENSKRWNPEIQYTSNYYKSNNVEFAVNTEGVYSEPRPIGTRYLTRNL

SEQ ID NO: 46387 - protein, 743 aa, synthetic construct
  REGION 1..743: note = Description of Artificial Sequence: Synthetic polypeptide
MAADGYLPDWLEDNLSEGIREWWALKPGAPQPKANQQHQDNARGLVLPGYKYLGPGNGLDKGEPVNAADAAALEHDKAYDQQLKAGDNPYLKYNHADAEFQERLKEDTSFGGNLGRAVFQAKKRLLEPLGLVEEAAKTAPGKKRPVEQSPQEPDSSAGIGKSGAQPAKKRLNFGQTGDTESVPDPQPIGEPPAAPSGVGSLTMASGGGAPVADNNEGADGVGSSSGNWHCDSQWLGDRVITTSTRTWALPTYNNHLYKQISNSTSGGSSNDNAYFGYSTPWGYFDFNRFHCHFSPRDWQRLINNNWGFRPKRLNFKLFNIQVKEVTDNNGVKTIANNLTSTVQVFTDSDYQLPYVLGSAHEGCLPPFPADVFMIPQYGYLTLNDGSQAVGRSSFYCLEYFPSQMLRTGNNFQFSYEFENVPFHSSYAHSQSLDRLMNPLIDQYLYYLSRTIQQGKQSVQTLKFSVAGPSNMAVQGRNYIPGPSYRQQRVSTTVTQNNNSEFAWPGASSWALNGRNSLMNPGPAMASHKEGEDRFFPLSGSLIFGKQGTGRDNVDADKVMITNEEEIKTTNPVATESYGQVATNHQSDGTLAVPFKAQAQTGWVQNQGILPGMVWQDRDVYLQGPIWAKIPHTDGNFHPSPLMGGFGMKHPPPQILIKNTPVPADPPTAFNKDKLNSFITQYSTGQVSVEIEWELQKENSKRWNPEIQYTSNYYKSNNVEFAVNTEGVYSEPRPIGTRYLTRNL

SEQ ID NO: 46388 - protein, 743 aa, synthetic construct
  REGION 1..743: note = Description of Artificial Sequence: Synthetic polypeptide
MAADGYLPDWLEDNLSEGIREWWALKPGAPQPKANQQHQDNARGLVLPGYKYLGPGNGLDKGEPVNAADAAALEHDKAYDQQLKAGDNPYLKYNHADAEFQERLKEDTSFGGNLGRAVFQAKKRLLEPLGLVEEAAKTAPGKKRPVEQSPQEPDSSAGIGKSGAQPAKKRLNFGQTGDTESVPDPQPIGEPPAAPSGVGSLTMASGGGAPVADNNEGADGVGSSSGNWHCDSQWLGDRVITTSTRTWALPTYNNHLYKQISNSTSGGSSNDNAYFGYSTPWGYFDFNRFHCHFSPRDWQRLINNNWGFRPKRLNFKLFNIQVKEVTDNNGVKTIANNLTSTVQVFTDSDYQLPYVLGSAHEGCLPPFPADVFMIPQYGYLTLNDGSQAVGRSSFYCLEYFPSQMLRTGNNFQFSYEFENVPFHSSYAHSQSLDRLMNPLIDQYLYYLSRTISINTKTNQTLKFSVAGPSNMAVQGRNYIPGPSYRQQRVSTTVTQNNNSEFAWPGASSWALNGRNSLMNPGPAMASHKEGEDRFFPLSGSLIFGKQGTGRDNVDADKVMITNEEEIKTTNPVATESYGQVATNHQSDGTLAVPFKAQAQTGWVQNQGILPGMVWQDRDVYLQGPIWAKIPHTDGNFHPSPLMGGFGMKHPPPQILIKNTPVPADPPTAFNKDKLNSFITQYSTGQVSVEIEWELQKENSKRWNPEIQYTSNYYKSNNVEFAVNTEGVYSEPRPIGTRYLTRNL

SEQ ID NO: 46389 - protein, 743 aa, synthetic construct
  REGION 1..743: note = Description of Artificial Sequence: Synthetic polypeptide
MAADGYLPDWLEDNLSEGIREWWALKPGAPQPKANQQHQDNARGLVLPGYKYLGPGNGLDKGEPVNAADAAALEHDKAYDQQLKAGDNPYLKYNHADAEFQERLKEDTSFGGNLGRAVFQAKKRLLEPLGLVEEAAKTAPGKKRPVEQSPQEPDSSAGIGKSGAQPAKKRLNFGQTGDTESVPDPQPIGEPPAAPSGVGSLTMASGGGAPVADNNEGADGVGSSSGNWHCDSQWLGDRVITTSTRTWALPTYNNHLYKQISNSTSGGSSNDNAYFGYSTPWGYFDFNRFHCHFSPRDWQRLINNNWGFRPKRLNFKLFNIQVKEVTDNNGVKTIANNLTSTVQVFTDSDYQLPYVLGSAHEGCLPPFPADVFMIPQYGYLTLNDGSQAVGRSSFYCLEYFPSQMLRTGNNFQFSYEFENVPFHSSYAHSQSLDRLMNPLIDQYLYYLSRTISNGTKQTQTLKFSVAGPSNMAVQGRNYIPGPSYRQQRVSTTVTQNNNSEFAWPGASSWALNGRNSLMNPGPAMASHKEGEDRFFPLSGSLIFGKQGTGRDNVDADKVMITNEEEIKTTNPVATESYGQVATNHQSDGTLAVPFKAQAQTGWVQNQGILPGMVWQDRDVYLQGPIWAKIPHTDGNFHPSPLMGGFGMKHPPPQILIKNTPVPADPPTAFNKDKLNSFITQYSTGQVSVEIEWELQKENSKRWNPEIQYTSNYYKSNNVEFAVNTEGVYSEPRPIGTRYLTRNL

SEQ ID NO: 46390 - protein, 743 aa, synthetic construct
  REGION 1..743: note = Description of Artificial Sequence: Synthetic polypeptide
MAADGYLPDWLEDNLSEGIREWWALKPGAPQPKANQQHQDNARGLVLPGYKYLGPGNGLDKGEPVNAADAAALEHDKAYDQQLKAGDNPYLKYNHADAEFQERLKEDTSFGGNLGRAVFQAKKRLLEPLGLVEEAAKTAPGKKRPVEQSPQEPDSSAGIGKSGAQPAKKRLNFGQTGDTESVPDPQPIGEPPAAPSGVGSLTMASGGGAPVADNNEGADGVGSSSGNWHCDSQWLGDRVITTSTRTWALPTYNNHLYKQISNSTSGGSSNDNAYFGYSTPWGYFDFNRFHCHFSPRDWQRLINNNWGFRPKRLNFKLFNIQVKEVTDNNGVKTIANNLTSTVQVFTDSDYQLPYVLGSAHEGCLPPFPADVFMIPQYGYLTLNDGSQAVGRSSFYCLEYFPSQMLRTGNNFQFSYEFENVPFHSSYAHSQSLDRLMNPLIDQYLYYLSRTIGSGKTAAQTLKFSVAGPSNMAVQGRNYIPGPSYRQQRVSTTVTQNNNSEFAWPGASSWALNGRNSLMNPGPAMASHKEGEDRFFPLSGSLIFGKQGTGRDNVDADKVMITNEEEIKTTNPVATESYGQVATNHQSDGTLAVPFKAQAQTGWVQNQGILPGMVWQDRDVYLQGPIWAKIPHTDGNFHPSPLMGGFGMKHPPPQILIKNTPVPADPPTAFNKDKLNSFITQYSTGQVSVEIEWELQKENSKRWNPEIQYTSNYYKSNNVEFAVNTEGVYSEPRPIGTRYLTRNL

SEQ ID NO: 46391 - protein, 743 aa, synthetic construct
  REGION 1..743: note = Description of Artificial Sequence: Synthetic polypeptide
MAADGYLPDWLEDNLSEGIREWWALKPGAPQPKANQQHQDNARGLVLPGYKYLGPGNGLDKGEPVNAADAAALEHDKAYDQQLKAGDNPYLKYNHADAEFQERLKEDTSFGGNLGRAVFQAKKRLLEPLGLVEEAAKTAPGKKRPVEQSPQEPDSSAGIGKSGAQPAKKRLNFGQTGDTESVPDPQPIGEPPAAPSGVGSLTMASGGGAPVADNNEGADGVGSSSGNWHCDSQWLGDRVITTSTRTWALPTYNNHLYKQISNSTSGGSSNDNAYFGYSTPWGYFDFNRFHCHFSPRDWQRLINNNWGFRPKRLNFKLFNIQVKEVTDNNGVKTIANNLTSTVQVFTDSDYQLPYVLGSAHEGCLPPFPADVFMIPQYGYLTLNDGSQAVGRSSFYCLEYFPSQMLRTGNNFQFSYEFENVPFHSSYAHSQSLDRLMNPLIDQYLYYLSRTIMGDKPTRQTLKFSVAGPSNMAVQGRNYIPGPSYRQQRVSTTVTQNNNSEFAWPGASSWALNGRNSLMNPGPAMASHKEGEDRFFPLSGSLIFGKQGTGRDNVDADKVMITNEEEIKTTNPVATESYGQVATNHQSDGTLAVPFKAQAQTGWVQNQGILPGMVWQDRDVYLQGPIWAKIPHTDGNFHPSPLMGGFGMKHPPPQILIKNTPVPADPPTAFNKDKLNSFITQYSTGQVSVEIEWELQKENSKRWNPEIQYTSNYYKSNNVEFAVNTEGVYSEPRPIGTRYLTRNL

SEQ ID NO: 46392 - protein, 743 aa, synthetic construct
  REGION 1..743: note = Description of Artificial Sequence: Synthetic polypeptide
MAADGYLPDWLEDNLSEGIREWWALKPGAPQPKANQQHQDNARGLVLPGYKYLGPGNGLDKGEPVNAADAAALEHDKAYDQQLKAGDNPYLKYNHADAEFQERLKEDTSFGGNLGRAVFQAKKRLLEPLGLVEEAAKTAPGKKRPVEQSPQEPDSSAGIGKSGAQPAKKRLNFGQTGDTESVPDPQPIGEPPAAPSGVGSLTMASGGGAPVADNNEGADGVGSSSGNWHCDSQWLGDRVITTSTRTWALPTYNNHLYKQISNSTSGGSSNDNAYFGYSTPWGYFDFNRFHCHFSPRDWQRLINNNWGFRPKRLNFKLFNIQVKEVTDNNGVKTIANNLTSTVQVFTDSDYQLPYVLGSAHEGCLPPFPADVFMIPQYGYLTLNDGSQAVGRSSFYCLEYFPSQMLRTGNNFQFSYEFENVPFHSSYAHSQSLDRLMNPLIDQYLYYLSRTIQPSGGNTQTLKFSVAGPSNMAVQGRNYIPGPSYRQQRVSTTVTQNNNSEFAWPGASSWALNGRNSLMNPGPAMASHKEGEDRFFPLSGSLIFGKQGTGRDNVDADKVMITNEEEIKTTNPVATESYGQVATNHQSDGTLAVPFKAQAQTGWVQNQGILPGMVWQDRDVYLQGPIWAKIPHTDGNFHPSPLMGGFGMKHPPPQILIKNTPVPADPPTAFNKDKLNSFITQYSTGQVSVEIEWELQKENSKRWNPEIQYTSNYYKSNNVEFAVNTEGVYSEPRPIGTRYLTRNL

SEQ ID NO: 46393 - protein, 743 aa, synthetic construct
  REGION 1..743: note = Description of Artificial Sequence: Synthetic polypeptide
MAADGYLPDWLEDNLSEGIREWWALKPGAPQPKANQQHQDNARGLVLPGYKYLGPGNGLDKGEPVNAADAAALEHDKAYDQQLKAGDNPYLKYNHADAEFQERLKEDTSFGGNLGRAVFQAKKRLLEPLGLVEEAAKTAPGKKRPVEQSPQEPDSSAGIGKSGAQPAKKRLNFGQTGDTESVPDPQPIGEPPAAPSGVGSLTMASGGGAPVADNNEGADGVGSSSGNWHCDSQWLGDRVITTSTRTWALPTYNNHLYKQISNSTSGGSSNDNAYFGYSTPWGYFDFNRFHCHFSPRDWQRLINNNWGFRPKRLNFKLFNIQVKEVTDNNGVKTIANNLTSTVQVFTDSDYQLPYVLGSAHEGCLPPFPADVFMIPQYGYLTLNDGSQAVGRSSFYCLEYFPSQMLRTGNNFQFSYEFENVPFHSSYAHSQSLDRLMNPLIDQYLYYLSRTIERGANTKQTLKFSVAGPSNMAVQGRNYIPGPSYRQQRVSTTVTQNNNSEFAWPGASSWALNGRNSLMNPGPAMASHKEGEDRFFPLSGSLIFGKQGTGRDNVDADKVMITNEEEIKTTNPVATESYGQVATNHQSDGTLAVPFKAQAQTGWVQNQGILPGMVWQDRDVYLQGPIWAKIPHTDGNFHPSPLMGGFGMKHPPPQILIKNTPVPADPPTAFNKDKLNSFITQYSTGQVSVEIEWELQKENSKRWNPEIQYTSNYYKSNNVEFAVNTEGVYSEPRPIGTRYLTRNL

SEQ ID NO: 46394 - protein, 743 aa, synthetic construct
  REGION 1..743: note = Description of Artificial Sequence: Synthetic polypeptide
MAADGYLPDWLEDNLSEGIREWWALKPGAPQPKANQQHQDNARGLVLPGYKYLGPGNGLDKGEPVNAADAAALEHDKAYDQQLKAGDNPYLKYNHADAEFQERLKEDTSFGGNLGRAVFQAKKRLLEPLGLVEEAAKTAPGKKRPVEQSPQEPDSSAGIGKSGAQPAKKRLNFGQTGDTESVPDPQPIGEPPAAPSGVGSLTMASGGGAPVADNNEGADGVGSSSGNWHCDSQWLGDRVITTSTRTWALPTYNNHLYKQISNSTSGGSSNDNAYFGYSTPWGYFDFNRFHCHFSPRDWQRLINNNWGFRPKRLNFKLFNIQVKEVTDNNGVKTIANNLTSTVQVFTDSDYQLPYVLGSAHEGCLPPFPADVFMIPQYGYLTLNDGSQAVGRSSFYCLEYFPSQMLRTGNNFQFSYEFENVPFHSSYAHSQSLDRLMNPLIDQYLYYLSRTITTGGHSSQTLKFSVAGPSNMAVQGRNYIPGPSYRQQRVSTTVTQNNNSEFAWPGASSWALNGRNSLMNPGPAMASHKEGEDRFFPLSGSLIFGKQGTGRDNVDADKVMITNEEEIKTTNPVATESYGQVATNHQSDGTLAVPFKAQAQTGWVQNQGILPGMVWQDRDVYLQGPIWAKIPHTDGNFHPSPLMGGFGMKHPPPQILIKNTPVPADPPTAFNKDKLNSFITQYSTGQVSVEIEWELQKENSKRWNPEIQYTSNYYKSNNVEFAVNTEGVYSEPRPIGTRYLTRNL

SEQ ID NO: 46395 - protein, 743 aa, synthetic construct
  REGION 1..743: note = Description of Artificial Sequence: Synthetic polypeptide
MAADGYLPDWLEDNLSEGIREWWALKPGAPQPKANQQHQDNARGLVLPGYKYLGPGNGLDKGEPVNAADAAALEHDKAYDQQLKAGDNPYLKYNHADAEFQERLKEDTSFGGNLGRAVFQAKKRLLEPLGLVEEAAKTAPGKKRPVEQSPQEPDSSAGIGKSGAQPAKKRLNFGQTGDTESVPDPQPIGEPPAAPSGVGSLTMASGGGAPVADNNEGADGVGSSSGNWHCDSQWLGDRVITTSTRTWALPTYNNHLYKQISNSTSGGSSNDNAYFGYSTPWGYFDFNRFHCHFSPRDWQRLINNNWGFRPKRLNFKLFNIQVKEVTDNNGVKTIANNLTSTVQVFTDSDYQLPYVLGSAHEGCLPPFPADVFMIPQYGYLTLNDGSQAVGRSSFYCLEYFPSQMLRTGNNFQFSYEFENVPFHSSYAHSQSLDRLMNPLIDQYLYYLSRTIGTTKTSEQTLKFSVAGPSNMAVQGRNYIPGPSYRQQRVSTTVTQNNNSEFAWPGASSWALNGRNSLMNPGPAMASHKEGEDRFFPLSGSLIFGKQGTGRDNVDADKVMITNEEEIKTTNPVATESYGQVATNHQSDGTLAVPFKAQAQTGWVQNQGILPGMVWQDRDVYLQGPIWAKIPHTDGNFHPSPLMGGFGMKHPPPQILIKNTPVPADPPTAFNKDKLNSFITQYSTGQVSVEIEWELQKENSKRWNPEIQYTSNYYKSNNVEFAVNTEGVYSEPRPIGTRYLTRNL

SEQ ID NO: 46396 - protein, 743 aa, synthetic construct
  REGION 1..743: note = Description of Artificial Sequence: Synthetic polypeptide
MAADGYLPDWLEDNLSEGIREWWALKPGAPQPKANQQHQDNARGLVLPGYKYLGPGNGLDKGEPVNAADAAALEHDKAYDQQLKAGDNPYLKYNHADAEFQERLKEDTSFGGNLGRAVFQAKKRLLEPLGLVEEAAKTAPGKKRPVEQSPQEPDSSAGIGKSGAQPAKKRLNFGQTGDTESVPDPQPIGEPPAAPSGVGSLTMASGGGAPVADNNEGADGVGSSSGNWHCDSQWLGDRVITTSTRTWALPTYNNHLYKQISNSTSGGSSNDNAYFGYSTPWGYFDFNRFHCHFSPRDWQRLINNNWGFRPKRLNFKLFNIQVKEVTDNNGVKTIANNLTSTVQVFTDSDYQLPYVLGSAHEGCLPPFPADVFMIPQYGYLTLNDGSQAVGRSSFYCLEYFPSQMLRTGNNFQFSYEFENVPFHSSYAHSQSLDRLMNPLIDQYLYYLSRTIGTGTSVLQTLKFSVAGPSNMAVQGRNYIPGPSYRQQRVSTTVTQNNNSEFAWPGASSWALNGRNSLMNPGPAMASHKEGEDRFFPLSGSLIFGKQGTGRDNVDADKVMITNEEEIKTTNPVATESYGQVATNHQSDGTLAVPFKAQAQTGWVQNQGILPGMVWQDRDVYLQGPIWAKIPHTDGNFHPSPLMGGFGMKHPPPQILIKNTPVPADPPTAFNKDKLNSFITQYSTGQVSVEIEWELQKENSKRWNPEIQYTSNYYKSNNVEFAVNTEGVYSEPRPIGTRYLTRNL

SEQ ID NO: 46397 - protein, 743 aa, synthetic construct
  REGION 1..743: note = Description of Artificial Sequence: Synthetic polypeptide
MAADGYLPDWLEDNLSEGIREWWALKPGAPQPKANQQHQDNARGLVLPGYKYLGPGNGLDKGEPVNAADAAALEHDKAYDQQLKAGDNPYLKYNHADAEFQERLKEDTSFGGNLGRAVFQAKKRLLEPLGLVEEAAKTAPGKKRPVEQSPQEPDSSAGIGKSGAQPAKKRLNFGQTGDTESVPDPQPIGEPPAAPSGVGSLTMASGGGAPVADNNEGADGVGSSSGNWHCDSQWLGDRVITTSTRTWALPTYNNHLYKQISNSTSGGSSNDNAYFGYSTPWGYFDFNRFHCHFSPRDWQRLINNNWGFRPKRLNFKLFNIQVKEVTDNNGVKTIANNLTSTVQVFTDSDYQLPYVLGSAHEGCLPPFPADVFMIPQYGYLTLNDGSQAVGRSSFYCLEYFPSQMLRTGNNFQFSYEFENVPFHSSYAHSQSLDRLMNPLIDQYLYYLSRTINQSGTKGQTLKFSVAGPSNMAVQGRNYIPGPSYRQQRVSTTVTQNNNSEFAWPGASSWALNGRNSLMNPGPAMASHKEGEDRFFPLSGSLIFGKQGTGRDNVDADKVMITNEEEIKTTNPVATESYGQVATNHQSDGTLAVPFKAQAQTGWVQNQGILPGMVWQDRDVYLQGPIWAKIPHTDGNFHPSPLMGGFGMKHPPPQILIKNTPVPADPPTAFNKDKLNSFITQYSTGQVSVEIEWELQKENSKRWNPEIQYTSNYYKSNNVEFAVNTEGVYSEPRPIGTRYLTRNL

SEQ ID NO: 46398 - protein, 743 aa, synthetic construct
  REGION 1..743: note = Description of Artificial Sequence: Synthetic polypeptide
MAADGYLPDWLEDNLSEGIREWWALKPGAPQPKANQQHQDNARGLVLPGYKYLGPGNGLDKGEPVNAADAAALEHDKAYDQQLKAGDNPYLKYNHADAEFQERLKEDTSFGGNLGRAVFQAKKRLLEPLGLVEEAAKTAPGKKRPVEQSPQEPDSSAGIGKSGAQPAKKRLNFGQTGDTESVPDPQPIGEPPAAPSGVGSLTMASGGGAPVADNNEGADGVGSSSGNWHCDSQWLGDRVITTSTRTWALPTYNNHLYKQISNSTSGGSSNDNAYFGYSTPWGYFDFNRFHCHFSPRDWQRLINNNWGFRPKRLNFKLFNIQVKEVTDNNGVKTIANNLTSTVQVFTDSDYQLPYVLGSAHEGCLPPFPADVFMIPQYGYLTLNDGSQAVGRSSFYCLEYFPSQMLRTGNNFQFSYEFENVPFHSSYAHSQSLDRLMNPLIDQYLYYLSRTIKGPGQMGQTLKFSVAGPSNMAVQGRNYIPGPSYRQQRVSTTVTQNNNSEFAWPGASSWALNGRNSLMNPGPAMASHKEGEDRFFPLSGSLIFGKQGTGRDNVDADKVMITNEEEIKTTNPVATESYGQVATNHQSDGTLAVPFKAQAQTGWVQNQGILPGMVWQDRDVYLQGPIWAKIPHTDGNFHPSPLMGGFGMKHPPPQILIKNTPVPADPPTAFNKDKLNSFITQYSTGQVSVEIEWELQKENSKRWNPEIQYTSNYYKSNNVEFAVNTEGVYSEPRPIGTRYLTRNL

SEQ ID NO: 46399 - protein, 743 aa, synthetic construct
  REGION 1..743: note = Description of Artificial Sequence: Synthetic polypeptide
MAADGYLPDWLEDNLSEGIREWWALKPGAPQPKANQQHQDNARGLVLPGYKYLGPGNGLDKGEPVNAADAAALEHDKAYDQQLKAGDNPYLKYNHADAEFQERLKEDTSFGGNLGRAVFQAKKRLLEPLGLVEEAAKTAPGKKRPVEQSPQEPDSSAGIGKSGAQPAKKRLNFGQTGDTESVPDPQPIGEPPAAPSGVGSLTMASGGGAPVADNNEGADGVGSSSGNWHCDSQWLGDRVITTSTRTWALPTYNNHLYKQISNSTSGGSSNDNAYFGYSTPWGYFDFNRFHCHFSPRDWQRLINNNWGFRPKRLNFKLFNIQVKEVTDNNGVKTIANNLTSTVQVFTDSDYQLPYVLGSAHEGCLPPFPADVFMIPQYGYLTLNDGSQAVGRSSFYCLEYFPSQMLRTGNNFQFSYEFENVPFHSSYAHSQSLDRLMNPLIDQYLYYLSRTIGTPSKAGQTLKFSVAGPSNMAVQGRNYIPGPSYRQQRVSTTVTQNNNSEFAWPGASSWALNGRNSLMNPGPAMASHKEGEDRFFPLSGSLIFGKQGTGRDNVDADKVMITNEEEIKTTNPVATESYGQVATNHQSDGTLAVPFKAQAQTGWVQNQGILPGMVWQDRDVYLQGPIWAKIPHTDGNFHPSPLMGGFGMKHPPPQILIKNTPVPADPPTAFNKDKLNSFITQYSTGQVSVEIEWELQKENSKRWNPEIQYTSNYYKSNNVEFAVNTEGVYSEPRPIGTRYLTRNL

SEQ ID NO: 46400 - protein, 743 aa, synthetic construct
  REGION 1..743: note = Description of Artificial Sequence: Synthetic polypeptide
MAADGYLPDWLEDNLSEGIREWWALKPGAPQPKANQQHQDNARGLVLPGYKYLGPGNGLDKGEPVNAADAAALEHDKAYDQQLKAGDNPYLKYNHADAEFQERLKEDTSFGGNLGRAVFQAKKRLLEPLGLVEEAAKTAPGKKRPVEQSPQEPDSSAGIGKSGAQPAKKRLNFGQTGDTESVPDPQPIGEPPAAPSGVGSLTMASGGGAPVADNNEGADGVGSSSGNWHCDSQWLGDRVITTSTRTWALPTYNNHLYKQISNSTSGGSSNDNAYFGYSTPWGYFDFNRFHCHFSPRDWQRLINNNWGFRPKRLNFKLFNIQVKEVTDNNGVKTIANNLTSTVQVFTDSDYQLPYVLGSAHEGCLPPFPADVFMIPQYGYLTLNDGSQAVGRSSFYCLEYFPSQMLRTGNNFQFSYEFENVPFHSSYAHSQSLDRLMNPLIDQYLYYLSRTIKDNTPGRQTLKFSVAGPSNMAVQGRNYIPGPSYRQQRVSTTVTQNNNSEFAWPGASSWALNGRNSLMNPGPAMASHKEGEDRFFPLSGSLIFGKQGTGRDNVDADKVMITNEEEIKTTNPVATESYGQVATNHQSDGTLAVPFKAQAQTGWVQNQGILPGMVWQDRDVYLQGPIWAKIPHTDGNFHPSPLMGGFGMKHPPPQILIKNTPVPADPPTAFNKDKLNSFITQYSTGQVSVEIEWELQKENSKRWNPEIQYTSNYYKSNNVEFAVNTEGVYSEPRPIGTRYLTRNL

SEQ ID NO: 46401 - protein, 743 aa, synthetic construct
  REGION 1..743: note = Description of Artificial Sequence: Synthetic polypeptide
MAADGYLPDWLEDNLSEGIREWWALKPGAPQPKANQQHQDNARGLVLPGYKYLGPGNGLDKGEPVNAADAAALEHDKAYDQQLKAGDNPYLKYNHADAEFQERLKEDTSFGGNLGRAVFQAKKRLLEPLGLVEEAAKTAPGKKRPVEQSPQEPDSSAGIGKSGAQPAKKRLNFGQTGDTESVPDPQPIGEPPAAPSGVGSLTMASGGGAPVADNNEGADGVGSSSGNWHCDSQWLGDRVITTSTRTWALPTYNNHLYKQISNSTSGGSSNDNAYFGYSTPWGYFDFNRFHCHFSPRDWQRLINNNWGFRPKRLNFKLFNIQVKEVTDNNGVKTIANNLTSTVQVFTDSDYQLPYVLGSAHEGCLPPFPADVFMIPQYGYLTLNDGSQAVGRSSFYCLEYFPSQMLRTGNNFQFSYEFENVPFHSSYAHSQSLDRLMNPLIDQYLYYLSRTINNLPRNLQTLKFSVAGPSNMAVQGRNYIPGPSYRQQRVSTTVTQNNNSEFAWPGASSWALNGRNSLMNPGPAMASHKEGEDRFFPLSGSLIFGKQGTGRDNVDADKVMITNEEEIKTTNPVATESYGQVATNHQSDGTLAVPFKAQAQTGWVQNQGILPGMVWQDRDVYLQGPIWAKIPHTDGNFHPSPLMGGFGMKHPPPQILIKNTPVPADPPTAFNKDKLNSFITQYSTGQVSVEIEWELQKENSKRWNPEIQYTSNYYKSNNVEFAVNTEGVYSEPRPIGTRYLTRNL

SEQ ID NO: 46402 - protein, 743 aa, synthetic construct
  REGION 1..743: note = Description of Artificial Sequence: Synthetic polypeptide
MAADGYLPDWLEDNLSEGIREWWALKPGAPQPKANQQHQDNARGLVLPGYKYLGPGNGLDKGEPVNAADAAALEHDKAYDQQLKAGDNPYLKYNHADAEFQERLKEDTSFGGNLGRAVFQAKKRLLEPLGLVEEAAKTAPGKKRPVEQSPQEPDSSAGIGKSGAQPAKKRLNFGQTGDTESVPDPQPIGEPPAAPSGVGSLTMASGGGAPVADNNEGADGVGSSSGNWHCDSQWLGDRVITTSTRTWALPTYNNHLYKQISNSTSGGSSNDNAYFGYSTPWGYFDFNRFHCHFSPRDWQRLINNNWGFRPKRLNFKLFNIQVKEVTDNNGVKTIANNLTSTVQVFTDSDYQLPYVLGSAHEGCLPPFPADVFMIPQYGYLTLNDGSQAVGRSSFYCLEYFPSQMLRTGNNFQFSYEFENVPFHSSYAHSQSLDRLMNPLIDQYLYYLSRTIRESSPSLQTLKFSVAGPSNMAVQGRNYIPGPSYRQQRVSTTVTQNNNSEFAWPGASSWALNGRNSLMNPGPAMASHKEGEDRFFPLSGSLIFGKQGTGRDNVDADKVMITNEEEIKTTNPVATESYGQVATNHQSDGTLAVPFKAQAQTGWVQNQGILPGMVWQDRDVYLQGPIWAKIPHTDGNFHPSPLMGGFGMKHPPPQILIKNTPVPADPPTAFNKDKLNSFITQYSTGQVSVEIEWELQKENSKRWNPEIQYTSNYYKSNNVEFAVNTEGVYSEPRPIGTRYLTRNL

SEQ ID NO: 46403 - protein, 743 aa, synthetic construct
  REGION 1..743: note = Description of Artificial Sequence: Synthetic polypeptide
MAADGYLPDWLEDNLSEGIREWWALKPGAPQPKANQQHQDNARGLVLPGYKYLGPGNGLDKGEPVNAADAAALEHDKAYDQQLKAGDNPYLKYNHADAEFQERLKEDTSFGGNLGRAVFQAKKRLLEPLGLVEEAAKTAPGKKRPVEQSPQEPDSSAGIGKSGAQPAKKRLNFGQTGDTESVPDPQPIGEPPAAPSGVGSLTMASGGGAPVADNNEGADGVGSSSGNWHCDSQWLGDRVITTSTRTWALPTYNNHLYKQISNSTSGGSSNDNAYFGYSTPWGYFDFNRFHCHFSPRDWQRLINNNWGFRPKRLNFKLFNIQVKEVTDNNGVKTIANNLTSTVQVFTDSDYQLPYVLGSAHEGCLPPFPADVFMIPQYGYLTLNDGSQAVGRSSFYCLEYFPSQMLRTGNNFQFSYEFENVPFHSSYAHSQSLDRLMNPLIDQYLYYLSRTIRVPLSTIQTLKFSVAGPSNMAVQGRNYIPGPSYRQQRVSTTVTQNNNSEFAWPGASSWALNGRNSLMNPGPAMASHKEGEDRFFPLSGSLIFGKQGTGRDNVDADKVMITNEEEIKTTNPVATESYGQVATNHQSDGTLAVPFKAQAQTGWVQNQGILPGMVWQDRDVYLQGPIWAKIPHTDGNFHPSPLMGGFGMKHPPPQILIKNTPVPADPPTAFNKDKLNSFITQYSTGQVSVEIEWELQKENSKRWNPEIQYTSNYYKSNNVEFAVNTEGVYSEPRPIGTRYLTRNL

SEQ ID NO: 46404 - DNA, 2232 bp, synthetic construct
  misc_feature 1..2232: note = Description of Artificial Sequence: Synthetic polynucleotide
  source 1..2232: mol_type = other DNA
atggctgccgatggttatcttccagattggctcgaggacaaccttagtgaaggaattcgcgagtggtgggctttgaaacctggagcccctcaacccaaggcaaatcaacaacatcaagacaacgctcgaggtcttgtgcttccgggttacaaataccttggacccggcaacggactcgacaagggggagccggtcaacgcagcagacgcggcggccctcgagcacgacaaggcctacgaccagcagctcaaggccggagacaacccgtacctcaagtacaaccacgccgacgccgagttccaggagcggctcaaagaagatacgtcttttgggggcaacctcgggcgagcagtcttccaggccaaaaagaggcttcttgaacctcttggtctggttgaggaagcggctaagacggctcctggaaagaagaggcctgtagagcagtctcctcaggaaccggactcctccgcgggtattggcaaatcgggtgcacagcccgctaaaaagagactcaatttcggtcagactggcgacacagagtcagtcccagaccctcaaccaatcggagaacctcccgcagccccctcaggtgtgggatctcttacaatggcttcaggtggtggcgcaccagtggcagacaataacgaaggtgccgatggagtgggtagttcctcgggaaattggcattgcgattcccaatggctgggggacagagtcatcaccaccagcacccgaacctgggccctgcccacctacaacaatcacctctacaagcaaatctccaacagcacatctggaggatcttcaaatgacaacgcctacttcggctacagcaccccctgggggtattttgacttcaacagattccactgccacttctcaccacgtgactggcagcgactcatcaacaacaactggggattccggcctaagcgactcaacttcaagctcttcaacattcaggtcaaagaggttacggacaacaatggagtcaagaccatcgccaataaccttaccagcacggtccaggtcttcacggactcagactatcagctcccgtacgtgctcgggtcggctcacgagggctgcctcccgccgttcccagcggacgttttcatgattcctcagtacgggtatctgacgcttaatgatggaagccaggccgtgggtcgttcgtccttttactgcctggaatatttcccgtcgcaaatgctaagaacgggtaacaacttccagttcagctacgagtttgagaacgtacctttccatagcagctacgctcacagccaaagcctggaccgactaatgaatccactcatcgaccaatacttgtactatctctcaaagactattgacggcgccgccaccaaaaaccaaacgctaaaattcagtgtggccggacccagcaacatggctgtccagggaagaaactacatacctggacccagctaccgacaacaacgtgtctcaaccactgtgactcaaaacaacaacagcgaatttgcttggcctggagcttcttcttgggctctcaatggacgtaatagcttgatgaatcctggacctgctatggccagccacaaagaaggagaggaccgtttctttcctttgtctggatctttaatttttggcaaacaaggaactggaagagacaacgtggatgcggacaaagtcatgataaccaacgaagaagaaattaaaactactaacccggtagcaacggagtcctatggacaagtggccacaaaccaccagagtgatgggactttggcggtgccttttaaggcacaggcgcagaccggctgggttcaaaaccaaggaatacttccgggtatggtttggcaggacagagatgtgtacctgcaaggacccatttgggccaaaattcctcacacggacggcaactttcacccttctccgctgatgggagggtttggaatgaagcacccgcctcctcagatcctcatcaaaaacacacctgtacctgcggatcctccaacggccttcaacaaggacaagctgaactctttcatcacccagtattctactggccaagtcagcgtggagatcgagtgggagctgcagaaggaaaacagcaagcgctggaacccggagatccagtacacttccaactattacaagtctaataatgttgaatttgctgttaatactgaaggtgtatatagtgaaccccgccccattggcaccagatacctgactcgtaatctgtaa

SEQ ID NO: 46405 - DNA, 2232 bp, synthetic construct
  misc_feature 1..2232: note = Description of Artificial Sequence: Synthetic polynucleotide
  source 1..2232: mol_type = other DNA
atggctgccgatggttatcttccagattggctcgaggacaaccttagtgaaggaattcgcgagtggtgggctttgaaacctggagcccctcaacccaaggcaaatcaacaacatcaagacaacgctcgaggtcttgtgcttccgggttacaaataccttggacccggcaacggactcgacaagggggagccggtcaacgcagcagacgcggcggccctcgagcacgacaaggcctacgaccagcagctcaaggccggagacaacccgtacctcaagtacaaccacgccgacgccgagttccaggagcggctcaaagaagatacgtcttttgggggcaacctcgggcgagcagtcttccaggccaaaaagaggcttcttgaacctcttggtctggttgaggaagcggctaagacggctcctggaaagaagaggcctgtagagcagtctcctcaggaaccggactcctccgcgggtattggcaaatcgggtgcacagcccgctaaaaagagactcaatttcggtcagactggcgacacagagtcagtcccagaccctcaaccaatcggagaacctcccgcagccccctcaggtgtgggatctcttacaatggcttcaggtggtggcgcaccagtggcagacaataacgaaggtgccgatggagtgggtagttcctcgggaaattggcattgcgattcccaatggctgggggacagagtcatcaccaccagcacccgaacctgggccctgcccacctacaacaatcacctctacaagcaaatctccaacagcacatctggaggatcttcaaatgacaacgcctacttcggctacagcaccccctgggggtattttgacttcaacagattccactgccacttctcaccacgtgactggcagcgactcatcaacaacaactggggattccggcctaagcgactcaacttcaagctcttcaacattcaggtcaaagaggttacggacaacaatggagtcaagaccatcgccaataaccttaccagcacggtccaggtcttcacggactcagactatcagctcccgtacgtgctcgggtcggctcacgagggctgcctcccgccgttcccagcggacgttttcatgattcctcagtacgggtatctgacgcttaatgatggaagccaggccgtgggtcgttcgtccttttactgcctggaatatttcccgtcgcaaatgctaagaacgggtaacaacttccagttcagctacgagtttgagaacgtacctttccatagcagctacgctcacagccaaagcctggaccgactaatgaatccactcatcgaccaatacttgtactatctctcaaagactattgacggccaaagcagcaaaagccaaacgctaaaattcagtgtggccggacccagcaacatggctgtccagggaagaaactacatacctggacccagctaccgacaacaacgtgtctcaaccactgtgactcaaaacaacaacagcgaatttgcttggcctggagcttcttcttgggctctcaatggacgtaatagcttgatgaatcctggacctgctatggccagccacaaagaaggagaggaccgtttctttcctttgtctggatctttaatttttggcaaacaaggaactggaagagacaacgtggatgcggacaaagtcatgataaccaacgaagaagaaattaaaactactaacccggtagcaacggagtcctatggacaagtggccacaaaccaccagagtgatgggactttggcggtgccttttaaggcacaggcgcagaccggctgggttcaaaaccaaggaatacttccgggtatggtttggcaggacagagatgtgtacctgcaaggacccatttgggccaaaattcctcacacggacggcaactttcacccttctccgctgatgggagggtttggaatgaagcacccgcctcctcagatcctcatcaaaaacacacctgtacctgcggatcctccaacggccttcaacaaggacaagctgaactctttcatcacccagtattctactggccaagtcagcgtggagatcgagtgggagctgcagaaggaaaacagcaagcgctggaacccggagatccagtacacttccaactattacaagtctaataatgttgaatttgctgttaatactgaaggtgtatatagtgaaccccgccccattggcaccagatacctgactcgtaatctgtaa

SEQ ID NO: 46406 - DNA, 2232 bp, synthetic construct
  misc_feature 1..2232: note = Description of Artificial Sequence: Synthetic polynucleotide
  source 1..2232: mol_type = other DNA
atggctgccgatggttatcttccagattggctcgaggacaaccttagtgaaggaattcgcgagtggtgggctttgaaacctggagcccctcaacccaaggcaaatcaacaacatcaagacaacgctcgaggtcttgtgcttccgggttacaaataccttggacccggcaacggactcgacaagggggagccggtcaacgcagcagacgcggcggccctcgagcacgacaaggcctacgaccagcagctcaaggccggagacaacccgtacctcaagtacaaccacgccgacgccgagttccaggagcggctcaaagaagatacgtcttttgggggcaacctcgggcgagcagtcttccaggccaaaaagaggcttcttgaacctcttggtctggttgaggaagcggctaagacggctcctggaaagaagaggcctgtagagcagtctcctcaggaaccggactcctccgcgggtattggcaaatcgggtgcacagcccgctaaaaagagactcaatttcggtcagactggcgacacagagtcagtcccagaccctcaaccaatcggagaacctcccgcagccccctcaggtgtgggatctcttacaatggcttcaggtggtggcgcaccagtggcagacaataacgaaggtgccgatggagtgggtagttcctcgggaaattggcattgcgattcccaatggctgggggacagagtcatcaccaccagcacccgaacctgggccctgcccacctacaacaatcacctctacaagcaaatctccaacagcacatctggaggatcttcaaatgacaacgcctacttcggctacagcaccccctgggggtattttgacttcaacagattccactgccacttctcaccacgtgactggcagcgactcatcaacaacaactggggattccggcctaagcgactcaacttcaagctcttcaacattcaggtcaaagaggttacggacaacaatggagtcaagaccatcgccaataaccttaccagcacggtccaggtcttcacggactcagactatcagctcccgtacgtgctcgggtcggctcacgagggctgcctcccgccgttcccagcggacgttttcatgattcctcagtacgggtatctgacgcttaatgatggaagccaggccgtgggtcgttcgtccttttactgcctggaatatttcccgtcgcaaatgctaagaacgggtaacaacttccagttcagctacgagtttgagaacgtacctttccatagcagctacgctcacagccaaagcctggaccgactaatgaatccactcatcgaccaatacttgtactatctctcaaagactattctccaaaccagcagccccggccaaacgctaaaattcagtgtggccggacccagcaacatggctgtccagggaagaaactacatacctggacccagctaccgacaacaacgtgtctcaaccactgtgactcaaaacaacaacagcgaatttgcttggcctggagcttcttcttgggctctcaatggacgtaatagcttgatgaatcctggacctgctatggccagccacaaagaaggagaggaccgtttctttcctttgtctggatctttaatttttggcaaacaaggaactggaagagacaacgtggatgcggacaaagtcatgataaccaacgaagaagaaattaaaactactaacccggtagcaacggagtcctatggacaagtggccacaaaccaccagagtgatgggactttggcggtgccttttaaggcacaggcgcagaccggctgggttcaaaaccaaggaatacttccgggtatggtttggcaggacagagatgtgtacctgcaaggacccatttgggccaaaattcctcacacggacggcaactttcacccttctccgctgatgggagggtttggaatgaagcacccgcctcctcagatcctcatcaaaaacacacctgtacctgcggatcctccaacggccttcaacaaggacaagctgaactctttcatcacccagtattctactggccaagtcagcgtggagatcgagtgggagctgcagaaggaaaacagcaagcgctggaacccggagatccagtacacttccaactattacaagtctaataatgttgaatttgctgttaatactgaaggtgtatatagtgaaccccgccccattggcaccagatacctgactcgtaatctgtaa

SEQ ID NO: 46407 - DNA, 2232 bp, synthetic construct
  misc_feature 1..2232: note = Description of Artificial Sequence: Synthetic polynucleotide
  source 1..2232: mol_type = other DNA
atggctgccgatggttatcttccagattggctcgaggacaaccttagtgaaggaattcgcgagtggtgggctttgaaacctggagcccctcaacccaaggcaaatcaacaacatcaagacaacgctcgaggtcttgtgcttccgggttacaaataccttggacccggcaacggactcgacaagggggagccggtcaacgcagcagacgcggcggccctcgagcacgacaaggcctacgaccagcagctcaaggccggagacaacccgtacctcaagtacaaccacgccgacgccgagttccaggagcggctcaaagaagatacgtcttttgggggcaacctcgggcgagcagtcttccaggccaaaaagaggcttcttgaacctcttggtctggttgaggaagcggctaagacggctcctggaaagaagaggcctgtagagcagtctcctcaggaaccggactcctccgcgggtattggcaaatcgggtgcacagcccgctaaaaagagactcaatttcggtcagactggcgacacagagtcagtcccagaccctcaaccaatcggagaacctcccgcagccccctcaggtgtgggatctcttacaatggcttcaggtggtggcgcaccagtggcagacaataacgaaggtgccgatggagtgggtagttcctcgggaaattggcattgcgattcccaatggctgggggacagagtcatcaccaccagcacccgaacctgggccctgcccacctacaacaatcacctctacaagcaaatctccaacagcacatctggaggatcttcaaatgacaacgcctacttcggctacagcaccccctgggggtattttgacttcaacagattccactgccacttctcaccacgtgactggcagcgactcatcaacaacaactggggattccggcctaagcgactcaacttcaagctcttcaacattcaggtcaaagaggttacggacaacaatggagtcaagaccatcgccaataaccttaccagcacggtccaggtcttcacggactcagactatcagctcccgtacgtgctcgggtcggctcacgagggctgcctcccgccgttcccagcggacgttttcatgattcctcagtacgggtatctgacgcttaatgatggaagccaggccgtgggtcgttcgtccttttactgcctggaatatttcccgtcgcaaatgctaagaacgggtaacaacttccagttcagctacgagtttgagaacgtacctttccatagcagctacgctcacagccaaagcctggaccgactaatgaatccactcatcgaccaatacttgtactatctctcaaagactattcagcagggtaagcagtcggttcaaacgctaaaattcagtgtggccggacccagcaacatggctgtccagggaagaaactacatacctggacccagctaccgacaacaacgtgtctcaaccactgtgactcaaaacaacaacagcgaatttgcttggcctggagcttcttcttgggctctcaatggacgtaatagcttgatgaatcctggacctgctatggccagccacaaagaaggagaggaccgtttctttcctttgtctggatctttaatttttggcaaacaaggaactggaagagacaacgtggatgcggacaaagtcatgataaccaacgaagaagaaattaaaactactaacccggtagcaacggagtcctatggacaagtggccacaaaccaccagagtgatgggactttggcggtgccttttaaggcacaggcgcagaccggctgggttcaaaaccaaggaatacttccgggtatggtttggcaggacagagatgtgtacctgcaaggacccatttgggccaaaattcctcacacggacggcaactttcacccttctccgctgatgggagggtttggaatgaagcacccgcctcctcagatcctcatcaaaaacacacctgtacctgcggatcctccaacggccttcaacaaggacaagctgaactctttcatcacccagtattctactggccaagtcagcgtggagatcgagtgggagctgcagaaggaaaacagcaagcgctggaacccggagatccagtacacttccaactattacaagtctaataatgttgaatttgctgttaatactgaaggtgtatatagtgaaccccgccccattggcaccagatacctgactcgtaatctgtaa

SEQ ID NO: 46408 - DNA, 2232 bp, synthetic construct
  misc_feature 1..2232: note = Description of Artificial Sequence: Synthetic polynucleotide
  source 1..2232: mol_type = other DNA
atggctgccgatggttatcttccagattggctcgaggacaaccttagtgaaggaattcgcgagtggtgggctttgaaacctggagcccctcaacccaaggcaaatcaacaacatcaagacaacgctcgaggtcttgtgcttccgggttacaaataccttggacccggcaacggactcgacaagggggagccggtcaacgcagcagacgcggcggccctcgagcacgacaaggcctacgaccagcagctcaaggccggagacaacccgtacctcaagtacaaccacgccgacgccgagttccaggagcggctcaaagaagatacgtcttttgggggcaacctcgggcgagcagtcttccaggccaaaaagaggcttcttgaacctcttggtctggttgaggaagcggctaagacggctcctggaaagaagaggcctgtagagcagtctcctcaggaaccggactcctccgcgggtattggcaaatcgggtgcacagcccgctaaaaagagactcaatttcggtcagactggcgacacagagtcagtcccagaccctcaaccaatcggagaacctcccgcagccccctcaggtgtgggatctcttacaatggcttcaggtggtggcgcaccagtggcagacaataacgaaggtgccgatggagtgggtagttcctcgggaaattggcattgcgattcccaatggctgggggacagagtcatcaccaccagcacccgaacctgggccctgcccacctacaacaatcacctctacaagcaaatctccaacagcacatctggaggatcttcaaatgacaacgcctacttcggctacagcaccccctgggggtattttgacttcaacagattccactgccacttctcaccacgtgactggcagcgactcatcaacaacaactggggattccggcctaagcgactcaacttcaagctcttcaacattcaggtcaaagaggttacggacaacaatggagtcaagaccatcgccaataaccttaccagcacggtccaggtcttcacggactcagactatcagctcccgtacgtgctcgggtcggctcacgagggctgcctcccgccgttcccagcggacgttttcatgattcctcagtacgggtatctgacgcttaatgatggaagccaggccgtgggtcgttcgtccttttactgcctggaatatttcccgtcgcaaatgctaagaacgggtaacaacttccagttcagctacgagtttgagaacgtacctttccatagcagctacgctcacagccaaagcctggaccgactaatgaatccactcatcgaccaatacttgtactatctctcaaagactatttctattaatactaagacgaatcaaacgctaaaattcagtgtggccggacccagcaacatggctgtccagggaagaaactacatacctggacccagctaccgacaacaacgtgtctcaaccactgtgactcaaaacaacaacagcgaatttgcttggcctggagcttcttcttgggctctcaatggacgtaatagcttgatgaatcctggacctgctatggccagccacaaagaaggagaggaccgtttctttcctttgtctggatctttaatttttggcaaacaaggaactggaagagacaacgtggatgcggacaaagtcatgataaccaacgaagaagaaattaaaactactaacccggtagcaacggagtcctatggacaagtggccacaaaccaccagagtgatgggactttggcggtgccttttaaggcacaggcgcagaccggctgggttcaaaaccaaggaatacttccgggtatggtttggcaggacagagatgtgtacctgcaaggacccatttgggccaaaattcctcacacggacggcaactttcacccttctccgctgatgggagggtttggaatgaagcacccgcctcctcagatcctcatcaaaaacacacctgtacctgcggatcctccaacggccttcaacaaggacaagctgaactctttcatcacccagtattctactggccaagtcagcgtggagatcgagtgggagctgcagaaggaaaacagcaagcgctggaacccggagatccagtacacttccaactattacaagtctaataatgttgaatttgctgttaatactgaaggtgtatatagtgaaccccgccccattggcaccagatacctgactcgtaatctgtaa

SEQ ID NO: 46409 - DNA, 2232 bp, synthetic construct
  misc_feature 1..2232: note = Description of Artificial Sequence: Synthetic polynucleotide
  source 1..2232: mol_type = other DNA
atggctgccgatggttatcttccagattggctcgaggacaaccttagtgaaggaattcgcgagtggtgggctttgaaacctggagcccctcaacccaaggcaaatcaacaacatcaagacaacgctcgaggtcttgtgcttccgggttacaaataccttggacccggcaacggactcgacaagggggagccggtcaacgcagcagacgcggcggccctcgagcacgacaaggcctacgaccagcagctcaaggccggagacaacccgtacctcaagtacaaccacgccgacgccgagttccaggagcggctcaaagaagatacgtcttttgggggcaacctcgggcgagcagtcttccaggccaaaaagaggcttcttgaacctcttggtctggttgaggaagcggctaagacggctcctggaaagaagaggcctgtagagcagtctcctcaggaaccggactcctccgcgggtattggcaaatcgggtgcacagcccgctaaaaagagactcaatttcggtcagactggcgacacagagtcagtcccagaccctcaaccaatcggagaacctcccgcagccccctcaggtgtgggatctcttacaatggcttcaggtggtggcgcaccagtggcagacaataacgaaggtgccgatggagtgggtagttcctcgggaaattggcattgcgattcccaatggctgggggacagagtcatcaccaccagcacccgaacctgggccctgcccacctacaacaatcacctctacaagcaaatctccaacagcacatctggaggatcttcaaatgacaacgcctacttcggctacagcaccccctgggggtattttgacttcaacagattccactgccacttctcaccacgtgactggcagcgactcatcaacaacaactggggattccggcctaagcgactcaacttcaagctcttcaacattcaggtcaaagaggttacggacaacaatggagtcaagaccatcgccaataaccttaccagcacggtccaggtcttcacggactcagactatcagctcccgtacgtgctcgggtcggctcacgagggctgcctcccgccgttcccagcggacgttttcatgattcctcagtacgggtatctgacgcttaatgatggaagccaggccgtgggtcgttcgtccttttactgcctggaatatttcccgtcgcaaatgctaagaacgggtaacaacttccagttcagctacgagtttgagaacgtacctttccatagcagctacgctcacagccaaagcctggaccgactaatgaatccactcatcgaccaatacttgtactatctctcaaagactatttctaatgggactaagcagactcaaacgctaaaattcagtgtggccggacccagcaacatggctgtccagggaagaaactacatacctggacccagctaccgacaacaacgtgtctcaaccactgtgactcaaaacaacaacagcgaatttgcttggcctggagcttcttcttgggctctcaatggacgtaatagcttgatgaatcctggacctgctatggccagccacaaagaaggagaggaccgtttctttcctttgtctggatctttaatttttggcaaacaaggaactggaagagacaacgtggatgcggacaaagtcatgataaccaacgaagaagaaattaaaactactaacccggtagcaacggagtcctatggacaagtggccacaaaccaccagagtgatgggactttggcggtgccttttaaggcacaggcgcagaccggctgggttcaaaaccaaggaatacttccgggtatggtttggcaggacagagatgtgtacctgcaaggacccatttgggccaaaattcctcacacggacggcaactttcacccttctccgctgatgggagggtttggaatgaagcacccgcctcctcagatcctcatcaaaaacacacctgtacctgcggatcctccaacggccttcaacaaggacaagctgaactctttcatcacccagtattctactggccaagtcagcgtggagatcgagtgggagctgcagaaggaaaacagcaagcgctggaacccggagatccagtacacttccaactattacaagtctaataatgttgaatttgctgttaatactgaaggtgtatatagtgaaccccgccccattggcaccagatacctgactcgtaatctgtaa

SEQ ID NO: 46410 - DNA, 2232 bp, synthetic construct
  misc_feature 1..2232: note = Description of Artificial Sequence: Synthetic polynucleotide
  source 1..2232: mol_type = other DNA
atggctgccgatggttatcttccagattggctcgaggacaaccttagtgaaggaattcgcgagtggtgggctttgaaacctggagcccctcaacccaaggcaaatcaacaacatcaagacaacgctcgaggtcttgtgcttccgggttacaaataccttggacccggcaacggactcgacaagggggagccggtcaacgcagcagacgcggcggccctcgagcacgacaaggcctacgaccagcagctcaaggccggagacaacccgtacctcaagtacaaccacgccgacgccgagttccaggagcggctcaaagaagatacgtcttttgggggcaacctcgggcgagcagtcttccaggccaaaaagaggcttcttgaacctcttggtctggttgaggaagcggctaagacggctcctggaaagaagaggcctgtagagcagtctcctcaggaaccggactcctccgcgggtattggcaaatcgggtgcacagcccgctaaaaagagactcaatttcggtcagactggcgacacagagtcagtcccagaccctcaaccaatcggagaacctcccgcagccccctcaggtgtgggatctcttacaatggcttcaggtggtggcgcaccagtggcagacaataacgaaggtgccgatggagtgggtagttcctcgggaaattggcattgcgattcccaatggctgggggacagagtcatcaccaccagcacccgaacctgggccctgcccacctacaacaatcacctctacaagcaaatctccaacagcacatctggaggatcttcaaatgacaacgcctacttcggctacagcaccccctgggggtattttgacttcaacagattccactgccacttctcaccacgtgactggcagcgactcatcaacaacaactggggattccggcctaagcgactcaacttcaagctcttcaacattcaggtcaaagaggttacggacaacaatggagtcaagaccatcgccaataaccttaccagcacggtccaggtcttcacggactcagactatcagctcccgtacgtgctcgggtcggctcacgagggctgcctcccgccgttcccagcggacgttttcatgattcctcagtacgggtatctgacgcttaatgatggaagccaggccgtgggtcgttcgtccttttactgcctggaatatttcccgtcgcaaatgctaagaacgggtaacaacttccagttcagctacgagtttgagaacgtacctttccatagcagctacgctcacagccaaagcctggaccgactaatgaatccactcatcgaccaatacttgtactatctctcaaagactattgggtcgggtaagactgctgcgcaaacgctaaaattcagtgtggccggacccagcaacatggctgtccagggaagaaactacatacctggacccagctaccgacaacaacgtgtctcaaccactgtgactcaaaacaacaacagcgaatttgcttggcctggagcttcttcttgggctctcaatggacgtaatagcttgatgaatcctggacctgctatggccagccacaaagaaggagaggaccgtttctttcctttgtctggatctttaatttttggcaaacaaggaactggaagagacaacgtggatgcggacaaagtcatgataaccaacgaagaagaaattaaaactactaacccggtagcaacggagtcctatggacaagtggccacaaaccaccagagtgatgggactttggcggtgccttttaaggcacaggcgcagaccggctgggttcaaaaccaaggaatacttccgggtatggtttggcaggacagagatgtgtacctgcaaggacccatttgggccaaaattcctcacacggacggcaactttcacccttctccgctgatgggagggtttggaatgaagcacccgcctcctcagatcctcatcaaaaacacacctgtacctgcggatcctccaacggccttcaacaaggacaagctgaactctttcatcacccagtattctactggccaagtcagcgtggagatcgagtgggagctgcagaaggaaaacagcaagcgctggaacccggagatccagtacacttccaactattacaagtctaataatgttgaatttgctgttaatactgaaggtgtatatagtgaaccccgccccattggcaccagatacctgactcgtaatctgtaa

SEQ ID NO: 46411 - DNA, 2232 bp, synthetic construct
  misc_feature 1..2232: note = Description of Artificial Sequence: Synthetic polynucleotide
  source 1..2232: mol_type = other DNA
atggctgccgatggttatcttccagattggctcgaggacaaccttagtgaaggaattcgcgagtggtgggctttgaaacctggagcccctcaacccaaggcaaatcaacaacatcaagacaacgctcgaggtcttgtgcttccgggttacaaataccttggacccggcaacggactcgacaagggggagccggtcaacgcagcagacgcggcggccctcgagcacgacaaggcctacgaccagcagctcaaggccggagacaacccgtacctcaagtacaaccacgccgacgccgagttccaggagcggctcaaagaagatacgtcttttgggggcaacctcgggcgagcagtcttccaggccaaaaagaggcttcttgaacctcttggtctggttgaggaagcggctaagacggctcctggaaagaagaggcctgtagagcagtctcctcaggaaccggactcctccgcgggtattggcaaatcgggtgcacagcccgctaaaaagagactcaatttcggtcagactggcgacacagagtcagtcccagaccctcaaccaatcggagaacctcccgcagccccctcaggtgtgggatctcttacaatggcttcaggtggtggcgcaccagtggcagacaataacgaaggtgccgatggagtgggtagttcctcgggaaattggcattgcgattcccaatggctgggggacagagtcatcaccaccagcacccgaacctgggccctgcccacctacaacaatcacctctacaagcaaatctccaacagcacatctggaggatcttcaaatgacaacgcctacttcggctacagcaccccctgggggtattttgacttcaacagattccactgccacttctcaccacgtgactggcagcgactcatcaacaacaactggggattccggcctaagcgactcaacttcaagctcttcaacattcaggtcaaagaggttacggacaacaatggagtcaagaccatcgccaataaccttaccagcacggtccaggtcttcacggactcagactatcagctcccgtacgtgctcgggtcggctcacgagggctgcctcccgccgttcccagcggacgttttcatgattcctcagtacgggtatctgacgcttaatgatggaagccaggccgtgggtcgttcgtccttttactgcctggaatatttcccgtcgcaaatgctaagaacgggtaacaacttccagttcagctacgagtttgagaacgtacctttccatagcagctacgctcacagccaaagcctggaccgactaatgaatccactcatcgaccaatacttgtactatctctcaaagactattatgggggataagccgacgaggcaaacgctaaaattcagtgtggccggacccagcaacatggctgtccagggaagaaactacatacctggacccagctaccgacaacaacgtgtctcaaccactgtgactcaaaacaacaacagcgaatttgcttggcctggagcttcttcttgggctctcaatggacgtaatagcttgatgaatcctggacctgctatggccagccacaaagaaggagaggaccgtttctttcctttgtctggatctttaatttttggcaaacaaggaactggaagagacaacgtggatgcggacaaagtcatgataaccaacgaagaagaaattaaaactactaacccggtagcaacggagtcctatggacaagtggccacaaaccaccagagtgatgggactttggcggtgccttttaaggcacaggcgcagaccggctgggttcaaaaccaaggaatacttccgggtatggtttggcaggacagagatgtgtacctgcaaggacccatttgggccaaaattcctcacacggacggcaactttcacccttctccgctgatgggagggtttggaatgaagcacccgcctcctcagatcctcatcaaaaacacacctgtacctgcggatcctccaacggccttcaacaaggacaagctgaactctttcatcacccagtattctactggccaagtcagcgtggagatcgagtgggagctgcagaaggaaaacagcaagcgctggaacccggagatccagtacacttccaactattacaagtctaataatgttgaatttgctgttaatactgaaggtgtatatagtgaaccccgccccattggcaccagatacctgactcgtaatctgtaa

SEQ ID NO: 46412 - DNA, 2232 bp, synthetic construct
  misc_feature 1..2232: note = Description of Artificial Sequence: Synthetic polynucleotide
  source 1..2232: mol_type = other DNA
atggctgccgatggttatcttccagattggctcgaggacaaccttagtgaaggaattcgcgagtggtgggctttgaaacctggagcccctcaacccaaggcaaatcaacaacatcaagacaacgctcgaggtcttgtgcttccgggttacaaataccttggacccggcaacggactcgacaagggggagccggtcaacgcagcagacgcggcggccctcgagcacgacaaggcctacgaccagcagctcaaggccggagacaacccgtacctcaagtacaaccacgccgacgccgagttccaggagcggctcaaagaagatacgtcttttgggggcaacctcgggcgagcagtcttccaggccaaaaagaggcttcttgaacctcttggtctggttgaggaagcggctaagacggctcctggaaagaagaggcctgtagagcagtctcctcaggaaccggactcctccgcgggtattggcaaatcgggtgcacagcccgctaaaaagagactcaatttcggtcagactggcgacacagagtcagtcccagaccctcaaccaatcggagaacctcccgcagccccctcaggtgtgggatctcttacaatggcttcaggtggtggcgcaccagtggcagacaataacgaaggtgccgatggagtgggtagttcctcgggaaattggcattgcgattcccaatggctgggggacagagtcatcaccaccagcacccgaacctgggccctgcccacctacaacaatcacctctacaagcaaatctccaacagcacatctggaggatcttcaaatgacaacgcctacttcggctacagcaccccctgggggtattttgacttcaacagattccactgccacttctcaccacgtgactggcagcgactcatcaacaacaactggggattccggcctaagcgactcaacttcaagctcttcaacattcaggtcaaagaggttacggacaacaatggagtcaagaccatcgccaataaccttaccagcacggtccaggtcttcacggactcagactatcagctcccgtacgtgctcgggtcggctcacgagggctgcctcccgccgttcccagcggacgttttcatgattcctcagtacgggtatctgacgcttaatgatggaagccaggccgtgggtcgttcgtccttttactgcctggaatatttcccgtcgcaaatgctaagaacgggtaacaacttccagttcagctacgagtttgagaacgtacctttccatagcagctacgctcacagccaaagcctggaccgactaatgaatccactcatcgaccaatacttgtactatctctcaaagactattcagcctagtgggggtaatactcaaacgctaaaattcagtgtggccggacccagcaacatggctgtccagggaagaaactacatacctggacccagctaccgacaacaacgtgtctcaaccactgtgactcaaaacaacaacagcgaatttgcttggcctggagcttcttcttgggctctcaatggacgtaatagcttgatgaatcctggacctgctatggccagccacaaagaaggagaggaccgtttctttcctttgtctggatctttaatttttggcaaacaaggaactggaagagacaacgtggatgcggacaaagtcatgataaccaacgaagaagaaattaaaactactaacccggtagcaacggagtcctatggacaagtggccacaaaccaccagagtgatgggactttggcggtgccttttaaggcacaggcgcagaccggctgggttcaaaaccaaggaatacttccgggtatggtttggcaggacagagatgtgtacctgcaaggacccatttgggccaaaattcctcacacggacggcaactttcacccttctccgctgatgggagggtttggaatgaagcacccgcctcctcagatcctcatcaaaaacacacctgtacctgcggatcctccaacggccttcaacaaggacaagctgaactctttcatcacccagtattctactggccaagtcagcgtggagatcgagtgggagctgcagaaggaaaacagcaagcgctggaacccggagatccagtacacttccaactattacaagtctaataatgttgaatttgctgttaatactgaaggtgtatatagtgaaccccgccccattggcaccagatacctgactcgtaatctgtaa

SEQ ID NO: 46413 - DNA, 2232 bp, synthetic construct
  misc_feature 1..2232: note = Description of Artificial Sequence: Synthetic polynucleotide
  source 1..2232: mol_type = other DNA
atggctgccgatggttatcttccagattggctcgaggacaaccttagtgaaggaattcgcgagtggtgggctttgaaacctggagcccctcaacccaaggcaaatcaacaacatcaagacaacgctcgaggtcttgtgcttccgggttacaaataccttggacccggcaacggactcgacaagggggagccggtcaacgcagcagacgcggcggccctcgagcacgacaaggcctacgaccagcagctcaaggccggagacaacccgtacctcaagtacaaccacgccgacgccgagttccaggagcggctcaaagaagatacgtcttttgggggcaacctcgggcgagcagtcttccaggccaaaaagaggcttcttgaacctcttggtctggttgaggaagcggctaagacggctcctggaaagaagaggcctgtagagcagtctcctcaggaaccggactcctccgcgggtattggcaaatcgggtgcacagcccgctaaaaagagactcaatttcggtcagactggcgacacagagtcagtcccagaccctcaaccaatcggagaacctcccgcagccccctcaggtgtgggatctcttacaatggcttcaggtggtggcgcaccagtggcagacaataacgaaggtgccgatggagtgggtagttcctcgggaaattggcattgcgattcccaatggctgggggacagagtcatcaccaccagcacccgaacctgggccctgcccacctacaacaatcacctctacaagcaaatctccaacagcacatctggaggatcttcaaatgacaacgcctacttcggctacagcaccccctgggggtattttgacttcaacagattccactgccacttctcaccacgtgactggcagcgactcatcaacaacaactggggattccggcctaagcgactcaacttcaagctcttcaacattcaggtcaaagaggttacggacaacaatggagtcaagaccatcgccaataaccttaccagcacggtccaggtcttcacggactcagactatcagctcccgtacgtgctcgggtcggctcacgagggctgcctcccgccgttcccagcggacgttttcatgattcctcagtacgggtatctgacgcttaatgatggaagccaggccgtgggtcgttcgtccttttactgcctggaatatttcccgtcgcaaatgctaagaacgggtaacaacttccagttcagctacgagtttgagaacgtacctttccatagcagctacgctcacagccaaagcctggaccgactaatgaatccactcatcgaccaatacttgtactatctctcaaagactattgaaagaggcgccaacaccaaacaaacgctaaaattcagtgtggccggacccagcaacatggctgtccagggaagaaactacatacctggacccagctaccgacaacaacgtgtctcaaccactgtgactcaaaacaacaacagcgaatttgcttggcctggagcttcttcttgggctctcaatggacgtaatagcttgatgaatcctggacctgctatggccagccacaaagaaggagaggaccgtttctttcctttgtctggatctttaatttttggcaaacaaggaactggaagagacaacgtggatgcggacaaagtcatgataaccaacgaagaagaaattaaaactactaacccggtagcaacggagtcctatggacaagtggccacaaaccaccagagtgatgggactttggcggtgccttttaaggcacaggcgcagaccggctgggttcaaaaccaaggaatacttccgggtatggtttggcaggacagagatgtgtacctgcaaggacccatttgggccaaaattcctcacacggacggcaactttcacccttctccgctgatgggagggtttggaatgaagcacccgcctcctcagatcctcatcaaaaacacacctgtacctgcggatcctccaacggccttcaacaaggacaagctgaactctttcatcacccagtattctactggccaagtcagcgtggagatcgagtgggagctgcagaaggaaaacagcaagcgctggaacccggagatccagtacacttccaactattacaagtctaataatgttgaatttgctgttaatactgaaggtgtatatagtgaaccccgccccattggcaccagatacctgactcgtaatctgtaa

SEQ ID NO: 46414 - DNA, 2232 bp, synthetic construct
  misc_feature 1..2232: note = Description of Artificial Sequence: Synthetic polynucleotide
  source 1..2232: mol_type = other DNA
atggctgccgatggttatcttccagattggctcgaggacaaccttagtgaaggaattcgcgagtggtgggctttgaaacctggagcccctcaacccaaggcaaatcaacaacatcaagacaacgctcgaggtcttgtgcttccgggttacaaataccttggacccggcaacggactcgacaagggggagccggtcaacgcagcagacgcggcggccctcgagcacgacaaggcctacgaccagcagctcaaggccggagacaacccgtacctcaagtacaaccacgccgacgccgagttccaggagcggctcaaagaagatacgtcttttgggggcaacctcgggcgagcagtcttccaggccaaaaagaggcttcttgaacctcttggtctggttgaggaagcggctaagacggctcctggaaagaagaggcctgtagagcagtctcctcaggaaccggactcctccgcgggtattggcaaatcgggtgcacagcccgctaaaaagagactcaatttcggtcagactggcgacacagagtcagtcccagaccctcaaccaatcggagaacctcccgcagccccctcaggtgtgggatctcttacaatggcttcaggtggtggcgcaccagtggcagacaataacgaaggtgccgatggagtgggtagttcctcgggaaattggcattgcgattcccaatggctgggggacagagtcatcaccaccagcacccgaacctgggccctgcccacctacaacaatcacctctacaagcaaatctccaacagcacatctggaggatcttcaaatgacaacgcctacttcggctacagcaccccctgggggtattttgacttcaacagattccactgccacttctcaccacgtgactggcagcgactcatcaacaacaactggggattccggcctaagcgactcaacttcaagctcttcaacattcaggtcaaagaggttacggacaacaatggagtcaagaccatcgccaataaccttaccagcacggtccaggtcttcacggactcagactatcagctcccgtacgtgctcgggtcggctcacgagggctgcctcccgccgttcccagcggacgttttcatgattcctcagtacgggtatctgacgcttaatgatggaagccaggccgtgggtcgttcgtccttttactgcctggaatatttcccgtcgcaaatgctaagaacgggtaacaacttccagttcagctacgagtttgagaacgtacctttccatagcagctacgctcacagccaaagcctggaccgactaatgaatccactcatcgaccaatacttgtactatctctcaaagactattaccaccggcggccacagcagccaaacgctaaaattcagtgtggccggacccagcaacatggctgtccagggaagaaactacatacctggacccagctaccgacaacaacgtgtctcaaccactgtgactcaaaacaacaacagcgaatttgcttggcctggagcttcttcttgggctctcaatggacgtaatagcttgatgaatcctggacctgctatggccagccacaaagaaggagaggaccgtttctttcctttgtctggatctttaatttttggcaaacaaggaactggaagagacaacgtggatgcggacaaagtcatgataaccaacgaagaagaaattaaaactactaacccggtagcaacggagtcctatggacaagtggccacaaaccaccagagtgatgggactttggcggtgccttttaaggcacaggcgcagaccggctgggttcaaaaccaaggaatacttccgggtatggtttggcaggacagagatgtgtacctgcaaggacccatttgggccaaaattcctcacacggacggcaactttcacccttctccgctgatgggagggtttggaatgaagcacccgcctcctcagatcctcatcaaaaacacacctgtacctgcggatcctccaacggccttcaacaaggacaagctgaactctttcatcacccagtattctactggccaagtcagcgtggagatcgagtgggagctgcagaaggaaaacagcaagcgctggaacccggagatccagtacacttccaactattacaagtctaataatgttgaatttgctgttaatactgaaggtgtatatagtgaaccccgccccattggcaccagatacctgactcgtaatctgtaa

SEQ ID NO: 46415 - DNA, 2232 bp, synthetic construct
  misc_feature 1..2232: note = Description of Artificial Sequence: Synthetic polynucleotide
  source 1..2232: mol_type = other DNA
atggctgccgatggttatcttccagattggctcgaggacaaccttagtgaaggaattcgcgagtggtgggctttgaaacctggagcccctcaacccaaggcaaatcaacaacatcaagacaacgctcgaggtcttgtgcttccgggttacaaataccttggacccggcaacggactcgacaagggggagccggtcaacgcagcagacgcggcggccctcgagcacgacaaggcctacgaccagcagctcaaggccggagacaacccgtacctcaagtacaaccacgccgacgccgagttccaggagcggctcaaagaagatacgtcttttgggggcaacctcgggcgagcagtcttccaggccaaaaagaggcttcttgaacctcttggtctggttgaggaagcggctaagacggctcctggaaagaagaggcctgtagagcagtctcctcaggaaccggactcctccgcgggtattggcaaatcgggtgcacagcccgctaaaaagagactcaatttcggtcagactggcgacacagagtcagtcccagaccctcaaccaatcggagaacctcccgcagccccctcaggtgtgggatctcttacaatggcttcaggtggtggcgcaccagtggcagacaataacgaaggtgccgatggagtgggtagttcctcgggaaattggcattgcgattcccaatggctgggggacagagtcatcaccaccagcacccgaacctgggccctgcccacctacaacaatcacctctacaagcaaatctccaacagcacatctggaggatcttcaaatgacaacgcctacttcggctacagcaccccctgggggtattttgacttcaacagattccactgccacttctcaccacgtgactggcagcgactcatcaacaacaactggggattccggcctaagcgactcaacttcaagctcttcaacattcaggtcaaagaggttacggacaacaatggagtcaagaccatcgccaataaccttaccagcacggtccaggtcttcacggactcagactatcagctcccgtacgtgctcgggtcggctcacgagggctgcctcccgccgttcccagcggacgttttcatgattcctcagtacgggtatctgacgcttaatgatggaagccaggccgtgggtcgttcgtccttttactgcctggaatatttcccgtcgcaaatgctaagaacgggtaacaacttccagttcagctacgagtttgagaacgtacctttccatagcagctacgctcacagccaaagcctggaccgactaatgaatccactcatcgaccaatacttgtactatctctcaaagactattggtacgacgaagactagtgagcaaacgctaaaattcagtgtggccggacccagcaacatggctgtccagggaagaaactacatacctggacccagctaccgacaacaacgtgtctcaaccactgtgactcaaaacaacaacagcgaatttgcttggcctggagcttcttcttgggctctcaatggacgtaatagcttgatgaatcctggacctgctatggccagccacaaagaaggagaggaccgtttctttcctttgtctggatctttaatttttggcaaacaaggaactggaagagacaacgtggatgcggacaaagtcatgataaccaacgaagaagaaattaaaactactaacccggtagcaacggagtcctatggacaagtggccacaaaccaccagagtgatgggactttggcggtgccttttaaggcacaggcgcagaccggctgggttcaaaaccaaggaatacttccgggtatggtttggcaggacagagatgtgtacctgcaaggacccatttgggccaaaattcctcacacggacggcaactttcacccttctccgctgatgggagggtttggaatgaagcacccgcctcctcagatcctcatcaaaaacacacctgtacctgcggatcctccaacggccttcaacaaggacaagctgaactctttcatcacccagtattctactggccaagtcagcgtggagatcgagtgggagctgcagaaggaaaacagcaagcgctggaacccggagatccagtacacttccaactattacaagtctaataatgttgaatttgctgttaatactgaaggtgtatatagtgaaccccgccccattggcaccagatacctgactcgtaatctgtaa

SEQ ID NO: 46416 - DNA, 2232 bp, synthetic construct
  misc_feature 1..2232: note = Description of Artificial Sequence: Synthetic polynucleotide
  source 1..2232: mol_type = other DNA
atggctgccgatggttatcttccagattggctcgaggacaaccttagtgaaggaattcgcgagtggtgggctttgaaacctggagcccctcaacccaaggcaaatcaacaacatcaagacaacgctcgaggtcttgtgcttccgggttacaaataccttggacccggcaacggactcgacaagggggagccggtcaacgcagcagacgcggcggccctcgagcacgacaaggcctacgaccagcagctcaaggccggagacaacccgtacctcaagtacaaccacgccgacgccgagttccaggagcggctcaaagaagatacgtcttttgggggcaacctcgggcgagcagtcttccaggccaaaaagaggcttcttgaacctcttggtctggttgaggaagcggctaagacggctcctggaaagaagaggcctgtagagcagtctcctcaggaaccggactcctccgcgggtattggcaaatcgggtgcacagcccgctaaaaagagactcaatttcggtcagactggcgacacagagtcagtcccagaccctcaaccaatcggagaacctcccgcagccccctcaggtgtgggatctcttacaatggcttcaggtggtggcgcaccagtggcagacaataacgaaggtgccgatggagtgggtagttcctcgggaaattggcattgcgattcccaatggctgggggacagagtcatcaccaccagcacccgaacctgggccctgcccacctacaacaatcacctctacaagcaaatctccaacagcacatctggaggatcttcaaatgacaacgcctacttcggctacagcaccccctgggggtattttgacttcaacagattccactgccacttctcaccacgtgactggcagcgactcatcaacaacaactggggattccggcctaagcgactcaacttcaagctcttcaacattcaggtcaaagaggttacggacaacaatggagtcaagaccatcgccaataaccttaccagcacggtccaggtcttcacggactcagactatcagctcccgtacgtgctcgggtcggctcacgagggctgcctcccgccgttcccagcggacgttttcatgattcctcagtacgggtatctgacgcttaatgatggaagccaggccgtgggtcgttcgtccttttactgcctggaatatttcccgtcgcaaatgctaagaacgggtaacaacttccagttcagctacgagtttgagaacgtacctttccatagcagctacgctcacagccaaagcctggaccgactaatgaatccactcatcgaccaatacttgtactatctctcaaagactattggtactgggactagtgttcttcaaacgctaaaattcagtgtggccggacccagcaacatggctgtccagggaagaaactacatacctggacccagctaccgacaacaacgtgtctcaaccactgtgactcaaaacaacaacagcgaatttgcttggcctggagcttcttcttgggctctcaatggacgtaatagcttgatgaatcctggacctgctatggccagccacaaagaaggagaggaccgtttctttcctttgtctggatctttaatttttggcaaacaaggaactggaagagacaacgtggatgcggacaaagtcatgataaccaacgaagaagaaattaaaactactaacccggtagcaacggagtcctatggacaagtggccacaaaccaccagagtgatgggactttggcggtgccttttaaggcacaggcgcagaccggctgggttcaaaaccaaggaatacttccgggtatggtttggcaggacagagatgtgtacctgcaaggacccatttgggccaaaattcctcacacggacggcaactttcacccttctccgctgatgggagggtttggaatgaagcacccgcctcctcagatcctcatcaaaaacacacctgtacctgcggatcctccaacggccttcaacaaggacaagctgaactctttcatcacccagtattctactggccaagtcagcgtggagatcgagtgggagctgcagaaggaaaacagcaagcgctggaacccggagatccagtacacttccaactattacaagtctaataatgttgaatttgctgttaatactgaaggtgtatatagtgaaccccgccccattggcaccagatacctgactcgtaatctgtaa

SEQ ID NO: 46417 - DNA, 2232 bp, synthetic construct
  misc_feature 1..2232: note = Description of Artificial Sequence: Synthetic polynucleotide
  source 1..2232: mol_type = other DNA
atggctgccgatggttatcttccagattggctcgaggacaaccttagtgaaggaattcgcgagtggtgggctttgaaacctggagcccctcaacccaaggcaaatcaacaacatcaagacaacgctcgaggtcttgtgcttccgggttacaaataccttggacccggcaacggactcgacaagggggagccggtcaacgcagcagacgcggcggccctcgagcacgacaaggcctacgaccagcagctcaaggccggagacaacccgtacctcaagtacaaccacgccgacgccgagttccaggagcggctcaaagaagatacgtcttttgggggcaacctcgggcgagcagtcttccaggccaaaaagaggcttcttgaacctcttggtctggttgaggaagcggctaagacggctcctggaaagaagaggcctgtagagcagtctcctcaggaaccggactcctccgcgggtattggcaaatcgggtgcacagcccgctaaaaagagactcaatttcggtcagactggcgacacagagtcagtcccagaccctcaaccaatcggagaacctcccgcagccccctcaggtgtgggatctcttacaatggcttcaggtggtggcgcaccagtggcagacaataacgaaggtgccgatggagtgggtagttcctcgggaaattggcattgcgattcccaatggctgggggacagagtcatcaccaccagcacccgaacctgggccctgcccacctacaacaatcacctctacaagcaaatctccaacagcacatctggaggatcttcaaatgacaacgcctacttcggctacagcaccccctgggggtattttgacttcaacagattccactgccacttctcaccacgtgactggcagcgactcatcaacaacaactggggattccggcctaagcgactcaacttcaagctcttcaacattcaggtcaaagaggttacggacaacaatggagtcaagaccatcgccaataaccttaccagcacggtccaggtcttcacggactcagactatcagctcccgtacgtgctcgggtcggctcacgagggctgcctcccgccgttcccagcggacgttttcatgattcctcagtacgggtatctgacgcttaatgatggaagccaggccgtgggtcgttcgtccttttactgcctggaatatttcccgtcgcaaatgctaagaacgggtaacaacttccagttcagctacgagtttgagaacgtacctttccatagcagctacgctcacagccaaagcctggaccgactaatgaatccactcatcgaccaatacttgtactatctctcaaagactattaatcagagtgggactaagggtcaaacgctaaaattcagtgtggccggacccagcaacatggctgtccagggaagaaactacatacctggacccagctaccgacaacaacgtgtctcaaccactgtgactcaaaacaacaacagcgaatttgcttggcctggagcttcttcttgggctctcaatggacgtaatagcttgatgaatcctggacctgctatggccagccacaaagaaggagaggaccgtttctttcctttgtctggatctttaatttttggcaaacaaggaactggaagagacaacgtggatgcggacaaagtcatgataaccaacgaagaagaaattaaaactactaacccggtagcaacggagtcctatggacaagtggccacaaaccaccagagtgatgggactttggcggtgccttttaaggcacaggcgcagaccggctgggttcaaaaccaaggaatacttccgggtatggtttggcaggacagagatgtgtacctgcaaggacccatttgggccaaaattcctcacacggacggcaactttcacccttctccgctgatgggagggtttggaatgaagcacccgcctcctcagatcctcatcaaaaacacacctgtacctgcggatcctccaacggccttcaacaaggacaagctgaactctttcatcacccagtattctactggccaagtcagcgtggagatcgagtgggagctgcagaaggaaaacagcaagcgctggaacccggagatccagtacacttccaactattacaagtctaataatgttgaatttgctgttaatactgaaggtgtatatagtgaaccccgccccattggcaccagatacctgactcgtaatctgtaa

SEQ ID NO: 46418 - DNA, 2232 bp, synthetic construct
  misc_feature 1..2232: note = Description of Artificial Sequence: Synthetic polynucleotide
  source 1..2232: mol_type = other DNA
atggctgccgatggttatcttccagattggctcgaggacaaccttagtgaaggaattcgcgagtggtgggctttgaaacctggagcccctcaacccaaggcaaatcaacaacatcaagacaacgctcgaggtcttgtgcttccgggttacaaataccttggacccggcaacggactcgacaagggggagccggtcaacgcagcagacgcggcggccctcgagcacgacaaggcctacgaccagcagctcaaggccggagacaacccgtacctcaagtacaaccacgccgacgccgagttccaggagcggctcaaagaagatacgtcttttgggggcaacctcgggcgagcagtcttccaggccaaaaagaggcttcttgaacctcttggtctggttgaggaagcggctaagacggctcctggaaagaagaggcctgtagagcagtctcctcaggaaccggactcctccgcgggtattggcaaatcgggtgcacagcccgctaaaaagagactcaatttcggtcagactggcgacacagagtcagtcccagaccctcaaccaatcggagaacctcccgcagccccctcaggtgtgggatctcttacaatggcttcaggtggtggcgcaccagtggcagacaataacgaaggtgccgatggagtgggtagttcctcgggaaattggcattgcgattcccaatggctgggggacagagtcatcaccaccagcacccgaacctgggccctgcccacctacaacaatcacctctacaagcaaatctccaacagcacatctggaggatcttcaaatgacaacgcctacttcggctacagcaccccctgggggtattttgacttcaacagattccactgccacttctcaccacgtgactggcagcgactcatcaacaacaactggggattccggcctaagcgactcaacttcaagctcttcaacattcaggtcaaagaggttacggacaacaatggagtcaagaccatcgccaataaccttaccagcacggtccaggtcttcacggactcagactatcagctcccgtacgtgctcgggtcggctcacgagggctgcctcccgccgttcccagcggacgttttcatgattcctcagtacgggtatctgacgcttaatgatggaagccaggccgtgggtcgttcgtccttttactgcctggaatatttcccgtcgcaaatgctaagaacgggtaacaacttccagttcagctacgagtttgagaacgtacctttccatagcagctacgctcacagccaaagcctggaccgactaatgaatccactcatcgaccaatacttgtactatctctcaaagactattaagggtcctggtcagatgggtcaaacgctaaaattcagtgtggccggacccagcaacatggctgtccagggaagaaactacatacctggacccagctaccgacaacaacgtgtctcaaccactgtgactcaaaacaacaacagcgaatttgcttggcctggagcttcttcttgggctctcaatggacgtaatagcttgatgaatcctggacctgctatggccagccacaaagaaggagaggaccgtttctttcctttgtctggatctttaatttttggcaaacaaggaactggaagagacaacgtggatgcggacaaagtcatgataaccaacgaagaagaaattaaaactactaacccggtagcaacggagtcctatggacaagtggccacaaaccaccagagtgatgggactttggcggtgccttttaaggcacaggcgcagaccggctgggttcaaaaccaaggaatacttccgggtatggtttggcaggacagagatgtgtacctgcaaggacccatttgggccaaaattcctcacacggacggcaactttcacccttctccgctgatgggagggtttggaatgaagcacccgcctcctcagatcctcatcaaaaacacacctgtacctgcggatcctccaacggccttcaacaaggacaagctgaactctttcatcacccagtattctactggccaagtcagcgtggagatcgagtgggagctgcagaaggaaaacagcaagcgctggaacccggagatccagtacacttccaactattacaagtctaataatgttgaatttgctgttaatactgaaggtgtatatagtgaaccccgccccattggcaccagatacctgactcgtaatctgtaa

SEQ ID NO: 46419 - DNA, 2232 bp, synthetic construct
  misc_feature 1..2232: note = Description of Artificial Sequence: Synthetic polynucleotide
  source 1..2232: mol_type = other DNA
atggctgccgatggttatcttccagattggctcgaggacaaccttagtgaaggaattcgcgagtggtgggctttgaaacctggagcccctcaacccaaggcaaatcaacaacatcaagacaacgctcgaggtcttgtgcttccgggttacaaataccttggacccggcaacggactcgacaagggggagccggtcaacgcagcagacgcggcggccctcgagcacgacaaggcctacgaccagcagctcaaggccggagacaacccgtacctcaagtacaaccacgccgacgccgagttccaggagcggctcaaagaagatacgtcttttgggggcaacctcgggcgagcagtcttccaggccaaaaagaggcttcttgaacctcttggtctggttgaggaagcggctaagacggctcctggaaagaagaggcctgtagagcagtctcctcaggaaccggactcctccgcgggtattggcaaatcgggtgcacagcccgctaaaaagagactcaatttcggtcagactggcgacacagagtcagtcccagaccctcaaccaatcggagaacctcccgcagccccctcaggtgtgggatctcttacaatggcttcaggtggtggcgcaccagtggcagacaataacgaaggtgccgatggagtgggtagttcctcgggaaattggcattgcgattcccaatggctgggggacagagtcatcaccaccagcacccgaacctgggccctgcccacctacaacaatcacctctacaagcaaatctccaacagcacatctggaggatcttcaaatgacaacgcctacttcggctacagcaccccctgggggtattttgacttcaacagattccactgccacttctcaccacgtgactggcagcgactcatcaacaacaactggggattccggcctaagcgactcaacttcaagctcttcaacattcaggtcaaagaggttacggacaacaatggagtcaagaccatcgccaataaccttaccagcacggtccaggtcttcacggactcagactatcagctcccgtacgtgctcgggtcggctcacgagggctgcctcccgccgttcccagcggacgttttcatgattcctcagtacgggtatctgacgcttaatgatggaagccaggccgtgggtcgttcgtccttttactgcctggaatatttcccgtcgcaaatgctaagaacgggtaacaacttccagttcagctacgagtttgagaacgtacctttccatagcagctacgctcacagccaaagcctggaccgactaatgaatccactcatcgaccaatacttgtactatctctcaaagactattggcacccccagcaaagccggccaaacgctaaaattcagtgtggccggacccagcaacatggctgtccagggaagaaactacatacctggacccagctaccgacaacaacgtgtctcaaccactgtgactcaaaacaacaacagcgaatttgcttggcctggagcttcttcttgggctctcaatggacgtaatagcttgatgaatcctggacctgctatggccagccacaaagaaggagaggaccgtttctttcctttgtctggatctttaatttttggcaaacaaggaactggaagagacaacgtggatgcggacaaagtcatgataaccaacgaagaagaaattaaaactactaacccggtagcaacggagtcctatggacaagtggccacaaaccaccagagtgatgggactttggcggtgccttttaaggcacaggcgcagaccggctgggttcaaaaccaaggaatacttccgggtatggtttggcaggacagagatgtgtacctgcaaggacccatttgggccaaaattcctcacacggacggcaactttcacccttctccgctgatgggagggtttggaatgaagcacccgcctcctcagatcctcatcaaaaacacacctgtacctgcggatcctccaacggccttcaacaaggacaagctgaactctttcatcacccagtattctactggccaagtcagcgtggagatcgagtgggagctgcagaaggaaaacagcaagcgctggaacccggagatccagtacacttccaactattacaagtctaataatgttgaatttgctgttaatactgaaggtgtatatagtgaaccccgccccattggcaccagatacctgactcgtaatctgtaa

SEQ ID NO: 46420 - DNA, 2211 bp, synthetic construct
  misc_feature 1..2211: note = Description of Artificial Sequence: Synthetic polynucleotide
  source 1..2211: mol_type = other DNA
atggctgccgatggttatcttccagattggctcgaggacaaccttagtgaaggaattcgcgagtggtgggctttgaaacctggagcccctcaacccaaggcaaatcaacaacatcaagacaacgctcgaggtcttgtgcttccgggttacaaataccttggacccggcaacggactcgacaagggggagccggtcaacgcagcagacgcggcggccctcgagcacgacaaggcctacgaccagcagctcaaggccggagacaacccgtacctcaagtacaaccacgccgacgccgagttccaggagcggctcaaagaagatacgtcttttgggggcaacctcgggcgagcagtcttccaggccaaaaagaggcttcttgaacctcttggtctggttgaggaagcggctaagacggctcctggaaagaagaggcctgtagagcagtctcctcaggaaccggactcctccgcgggtattggcaaatcgggtgcacagcccgctaaaaagagactcaatttcggtcagactggcgacacagagtcagtcccagaccctcaaccaatcggagaacctcccgcagccccctcaggtgtgggatctcttacaatggcttcaggtggtggcgcaccagtggcagacaataacgaaggtgccgatggagtgggtagttcctcgggaaattggcattgcgattcccaatggctgggggacagagtcatcaccaccagcacccgaacctgggccctgcccacctacaacaatcacctctacaagcaaatctccaacagcacatctggaggatcttcaaatgacaacgcctacttcggctacagcaccccctgggggtattttgacttcaacagattccactgccacttctcaccacgtgactggcagcgactcatcaacaacaactggggattccggcctaagcgactcaacttcaagctcttcaacattcaggtcaaagaggttacggacaacaatggagtcaagaccatcgccaataaccttaccagcacggtccaggtcttcacggactcagactatcagctcccgtacgtgctcgggtcggctcacgagggctgcctcccgccgttcccagcggacgttttcatgattcctcagtacgggtatctgacgcttaatgatggaagccaggccgtgggtcgttcgtccttttactgcctggaatatttcccgtcgcaaatgctaagaacgggtaacaacttccagttcagctacgagtttgagaacgtacctttccatagcagctacgctcacagccaaagcctggaccgactaatgaatccactcatcgaccaatacttgtactatctctcaaagactattaaggataatactcctgggaggcaaacgctaaaattcagtgtggccggacccagcaacatggctgtccagggaagaaactacatacctggacccagctaccgacaacaacgtgtctcaaccactgtgactcaaaacaacaacagcgaatttgcttggcctggagcttcttcttgggctctcaatggacgtaatagcttgatgaatcctggacctgctatggccagccacaaagaaggagaggaccgtttctttcctttgtctggatctttaatttttggcaaacaaggaactggaagagacaacgtggatgcggacaaagtcatgataaccaacgaagaagaaattaaaactactaacccggtagcaacggagtcctatggacaagtggccacaaaccaccagagtgcccaagcacaggcgcagaccggctgggttcaaaaccaaggaatacttccgggtatggtttggcaggacagagatgtgtacctgcaaggacccatttgggccaaaattcctcacacggacggcaactttcacccttctccgctgatgggagggtttggaatgaagcacccgcctcctcagatcctcatcaaaaacacacctgtacctgcggatcctccaacggccttcaacaaggacaagctgaactctttcatcacccagtattctactggccaagtcagcgtggagatcgagtgggagctgcagaaggaaaacagcaagcgctggaacccggagatccagtacacttccaactattacaagtctaataatgttgaatttgctgttaatactgaaggtgtatatagtgaaccccgccccattggcaccagatacctgactcgtaatctgtaa

SEQ ID NO: 46421 - DNA, 2211 bp, synthetic construct
  misc_feature 1..2211: note = Description of Artificial Sequence: Synthetic polynucleotide
  source 1..2211: mol_type = other DNA
atggctgccgatggttatcttccagattggctcgaggacaaccttagtgaaggaattcgcgagtggtgggctttgaaacctggagcccctcaacccaaggcaaatcaacaacatcaagacaacgctcgaggtcttgtgcttccgggttacaaataccttggacccggcaacggactcgacaagggggagccggtcaacgcagcagacgcggcggccctcgagcacgacaaggcctacgaccagcagctcaaggccggagacaacccgtacctcaagtacaaccacgccgacgccgagttccaggagcggctcaaagaagatacgtcttttgggggcaacctcgggcgagcagtcttccaggccaaaaagaggcttcttgaacctcttggtctggttgaggaagcggctaagacggctcctggaaagaagaggcctgtagagcagtctcctcaggaaccggactcctccgcgggtattggcaaatcgggtgcacagcccgctaaaaagagactcaatttcggtcagactggcgacacagagtcagtcccagaccctcaaccaatcggagaacctcccgcagccccctcaggtgtgggatctcttacaatggcttcaggtggtggcgcaccagtggcagacaataacgaaggtgccgatggagtgggtagttcctcgggaaattggcattgcgattcccaatggctgggggacagagtcatcaccaccagcacccgaacctgggccctgcccacctacaacaatcacctctacaagcaaatctccaacagcacatctggaggatcttcaaatgacaacgcctacttcggctacagcaccccctgggggtattttgacttcaacagattccactgccacttctcaccacgtgactggcagcgactcatcaacaacaactggggattccggcctaagcgactcaacttcaagctcttcaacattcaggtcaaagaggttacggacaacaatggagtcaagaccatcgccaataaccttaccagcacggtccaggtcttcacggactcagactatcagctcccgtacgtgctcgggtcggctcacgagggctgcctcccgccgttcccagcggacgttttcatgattcctcagtacgggtatctgacgcttaatgatggaagccaggccgtgggtcgttcgtccttttactgcctggaatatttcccgtcgcaaatgctaagaacgggtaacaacttccagttcagctacgagtttgagaacgtacctttccatagcagctacgctcacagccaaagcctggaccgactaatgaatccactcatcgaccaatacttgtactatctctcaaagactattaacaacctccccagaaacctccaaacgctaaaattcagtgtggccggacccagcaacatggctgtccagggaagaaactacatacctggacccagctaccgacaacaacgtgtctcaaccactgtgactcaaaacaacaacagcgaatttgcttggcctggagcttcttcttgggctctcaatggacgtaatagcttgatgaatcctggacctgctatggccagccacaaagaaggagaggaccgtttctttcctttgtctggatctttaatttttggcaaacaaggaactggaagagacaacgtggatgcggacaaagtcatgataaccaacgaagaagaaattaaaactactaacccggtagcaacggagtcctatggacaagtggccacaaaccaccagagtgcccaagcacaggcgcagaccggctgggttcaaaaccaaggaatacttccgggtatggtttggcaggacagagatgtgtacctgcaaggacccatttgggccaaaattcctcacacggacggcaactttcacccttctccgctgatgggagggtttggaatgaagcacccgcctcctcagatcctcatcaaaaacacacctgtacctgcggatcctccaacggccttcaacaaggacaagctgaactctttcatcacccagtattctactggccaagtcagcgtggagatcgagtgggagctgcagaaggaaaacagcaagcgctggaacccggagatccagtacacttccaactattacaagtctaataatgttgaatttgctgttaatactgaaggtgtatatagtgaaccccgccccattggcaccagatacctgactcgtaatctgtaa

SEQ ID NO: 46422 - DNA, 2211 bp, synthetic construct
  misc_feature 1..2211: note = Description of Artificial Sequence: Synthetic polynucleotide
  source 1..2211: mol_type = other DNA
atggctgccgatggttatcttccagattggctcgaggacaaccttagtgaaggaattcgcgagtggtgggctttgaaacctggagcccctcaacccaaggcaaatcaacaacatcaagacaacgctcgaggtcttgtgcttccgggttacaaataccttggacccggcaacggactcgacaagggggagccggtcaacgcagcagacgcggcggccctcgagcacgacaaggcctacgaccagcagctcaaggccggagacaacccgtacctcaagtacaaccacgccgacgccgagttccaggagcggctcaaagaagatacgtcttttgggggcaacctcgggcgagcagtcttccaggccaaaaagaggcttcttgaacctcttggtctggttgaggaagcggctaagacggctcctggaaagaagaggcctgtagagcagtctcctcaggaaccggactcctccgcgggtattggcaaatcgggtgcacagcccgctaaaaagagactcaatttcggtcagactggcgacacagagtcagtcccagaccctcaaccaatcggagaacctcccgcagccccctcaggtgtgggatctcttacaatggcttcaggtggtggcgcaccagtggcagacaataacgaaggtgccgatggagtgggtagttcctcgggaaattggcattgcgattcccaatggctgggggacagagtcatcaccaccagcacccgaacctgggccctgcccacctacaacaatcacctctacaagcaaatctccaacagcacatctggaggatcttcaaatgacaacgcctacttcggctacagcaccccctgggggtattttgacttcaacagattccactgccacttctcaccacgtgactggcagcgactcatcaacaacaactggggattccggcctaagcgactcaacttcaagctcttcaacattcaggtcaaagaggttacggacaacaatggagtcaagaccatcgccaataaccttaccagcacggtccaggtcttcacggactcagactatcagctcccgtacgtgctcgggtcggctcacgagggctgcctcccgccgttcccagcggacgttttcatgattcctcagtacgggtatctgacgcttaatgatggaagccaggccgtgggtcgttcgtccttttactgcctggaatatttcccgtcgcaaatgctaagaacgggtaacaacttccagttcagctacgagtttgagaacgtacctttccatagcagctacgctcacagccaaagcctggaccgactaatgaatccactcatcgaccaatacttgtactatctctcaaagactattagagaaagcagccccagcctccaaacgctaaaattcagtgtggccggacccagcaacatggctgtccagggaagaaactacatacctggacccagctaccgacaacaacgtgtctcaaccactgtgactcaaaacaacaacagcgaatttgcttggcctggagcttcttcttgggctctcaatggacgtaatagcttgatgaatcctggacctgctatggccagccacaaagaaggagaggaccgtttctttcctttgtctggatctttaatttttggcaaacaaggaactggaagagacaacgtggatgcggacaaagtcatgataaccaacgaagaagaaattaaaactactaacccggtagcaacggagtcctatggacaagtggccacaaaccaccagagtgcccaagcacaggcgcagaccggctgggttcaaaaccaaggaatacttccgggtatggtttggcaggacagagatgtgtacctgcaaggacccatttgggccaaaattcctcacacggacggcaactttcacccttctccgctgatgggagggtttggaatgaagcacccgcctcctcagatcctcatcaaaaacacacctgtacctgcggatcctccaacggccttcaacaaggacaagctgaactctttcatcacccagtattctactggccaagtcagcgtggagatcgagtgggagctgcagaaggaaaacagcaagcgctggaacccggagatccagtacacttccaactattacaagtctaataatgttgaatttgctgttaatactgaaggtgtatatagtgaaccccgccccattggcaccagatacctgactcgtaatctgtaa

SEQ ID NO: 46423 - DNA, 2211 bp, synthetic construct
  misc_feature 1..2211: note = Description of Artificial Sequence: Synthetic polynucleotide
  source 1..2211: mol_type = other DNA
atggctgccgatggttatcttccagattggctcgaggacaaccttagtgaaggaattcgcgagtggtgggctttgaaacctggagcccctcaacccaaggcaaatcaacaacatcaagacaacgctcgaggtcttgtgcttccgggttacaaataccttggacccggcaacggactcgacaagggggagccggtcaacgcagcagacgcggcggccctcgagcacgacaaggcctacgaccagcagctcaaggccggagacaacccgtacctcaagtacaaccacgccgacgccgagttccaggagcggctcaaagaagatacgtcttttgggggcaacctcgggcgagcagtcttccaggccaaaaagaggcttcttgaacctcttggtctggttgaggaagcggctaagacggctcctggaaagaagaggcctgtagagcagtctcctcaggaaccggactcctccgcgggtattggcaaatcgggtgcacagcccgctaaaaagagactcaatttcggtcagactggcgacacagagtcagtcccagaccctcaaccaatcggagaacctcccgcagccccctcaggtgtgggatctcttacaatggcttcaggtggtggcgcaccagtggcagacaataacgaaggtgccgatggagtgggtagttcctcgggaaattggcattgcgattcccaatggctgggggacagagtcatcaccaccagcacccgaacctgggccctgcccacctacaacaatcacctctacaagcaaatctccaacagcacatctggaggatcttcaaatgacaacgcctacttcggctacagcaccccctgggggtattttgacttcaacagattccactgccacttctcaccacgtgactggcagcgactcatcaacaacaactggggattccggcctaagcgactcaacttcaagctcttcaacattcaggtcaaagaggttacggacaacaatggagtcaagaccatcgccaataaccttaccagcacggtccaggtcttcacggactcagactatcagctcccgtacgtgctcgggtcggctcacgagggctgcctcccgccgttcccagcggacgttttcatgattcctcagtacgggtatctgacgcttaatgatggaagccaggccgtgggtcgttcgtccttttactgcctggaatatttcccgtcgcaaatgctaagaacgggtaacaacttccagttcagctacgagtttgagaacgtacctttccatagcagctacgctcacagccaaagcctggaccgactaatgaatccactcatcgaccaatacttgtactatctctcaaagactattcgtgttcctctttcgactattcaaacgctaaaattcagtgtggccggacccagcaacatggctgtccagggaagaaactacatacctggacccagctaccgacaacaacgtgtctcaaccactgtgactcaaaacaacaacagcgaatttgcttggcctggagcttcttcttgggctctcaatggacgtaatagcttgatgaatcctggacctgctatggccagccacaaagaaggagaggaccgtttctttcctttgtctggatctttaatttttggcaaacaaggaactggaagagacaacgtggatgcggacaaagtcatgataaccaacgaagaagaaattaaaactactaacccggtagcaacggagtcctatggacaagtggccacaaaccaccagagtgcccaagcacaggcgcagaccggctgggttcaaaaccaaggaatacttccgggtatggtttggcaggacagagatgtgtacctgcaaggacccatttgggccaaaattcctcacacggacggcaactttcacccttctccgctgatgggagggtttggaatgaagcacccgcctcctcagatcctcatcaaaaacacacctgtacctgcggatcctccaacggccttcaacaaggacaagctgaactctttcatcacccagtattctactggccaagtcagcgtggagatcgagtgggagctgcagaaggaaaacagcaagcgctggaacccggagatccagtacacttccaactattacaagtctaataatgttgaatttgctgttaatactgaaggtgtatatagtgaaccccgccccattggcaccagatacctgactcgtaatctgtaa

SEQ ID NO: 46424 - protein, 7 aa, synthetic construct
  REGION 1..7: note = Description of Artificial Sequence: Synthetic peptide
  MOD_RES 4: note = Any amino acid
TLAXPFK

SEQ ID NO: 46425-46428 - skipped (4 entries)

SEQ ID NO: 46429 - DNA, 21 bp, synthetic construct
  misc_feature 1..21: note = Description of Artificial Sequence: Synthetic oligonucleotide
  source 1..21: mol_type = other DNA
aacaacctccccagaaacctc
